(19) United States
(12) Patent Application Publication
(10) Pub. No.: US 2007/0161596 A1
(43) Pub. Date: Jul. 12, 2007

(54) RNA INTERFERENCE MEDIATED TREATMENT OF ALZHEIMER'S DISEASE USING SHORT INTERFERING NUCLEIC ACID (siNA)

(75) Inventors: James McSwiggen, Boulder, CO (US); Leonid Beigelman, Longmont, CO (US)

Correspondence Address: MCDONNELL, BOEHNEN, HULBERT AND BERGHOFF, LLP, 300 SOUTH WACKER DRIVE, SUITE 3100, CHICAGO, IL, 60606, US

(73) Assignee: SIRNA THERAPEUTICS, INC., San Francisco, CA (US)

(21) Appl. No.: 11/684,465

(22) Filed: Mar. 9, 2007

Related U.S. Application Data
(63) Continuation of application No. 10/877,889, filed on Jun. 25, 2004.
Application No. 10/877,889 is a continuation-in-part of application No. 10/607,933, filed on Jun. 27, 2003.
Application No. 10/607,933 is a continuation-in-part of application No. 09/930,423, filed on Aug. 15, 2001, now abandoned.
Application No. 10/607,933 is a continuation-in-part of application No. PCT/US03/04710, filed on Feb. 18, 2003.
Application No. PCT/US03/04710 is a continuation-in-part of application No. 10/205,309, filed on Jul. 25, 2002.
(63) Continuation-in-part of application No. PCT/US04/16390, filed on May 24, 2004.
Application No. PCT/US04/16390 is a continuation-in-part of application No. 10/826,966, filed on Apr. 16, 2004.
Application No. 10/826,966 is a continuation-in-part of application No. 10/757,803, filed on Jan. 14, 2004.
Application No. 10/757,803 is a continuation-in-part of application No. 10/720,448, filed on Nov. 24, 2003, now abandoned.
Application No. 10/720,448 is a continuation-in-part of application No. 10/693,059, filed on Oct. 23, 2003, now abandoned.
Application No. 10/693,059 is a continuation-in-part of application No. 10/444,853, filed on May 23, 2003.
Application No. 10/444,853 is a continuation-in-part of application No. PCT/US03/05346, filed on Feb. 20, 2003.
Application No. 10/444,853 is a continuation-in-part of application No. PCT/US03/05028, filed on Feb. 20, 2003.
Application No. 10/877,889 is a continuation-in-part of application No. PCT/US04/13456, filed on Apr. 30, 2004.
Application No. PCT/US04/13456 is a continuation-in-part of application No. 10/780,447, filed on Feb. 13, 2004.
Application No. 10/780,447 is a continuation-in-part of application No. 10/427,160, filed on Apr. 30, 2003.
Application No. 10/427,160 is a continuation-in-part of application No. PCT/US02/15876, filed on May 17, 2002.
(63) Continuation-in-part of application No. 10/727,780, filed on Dec. 3, 2003.
(60) Provisional application No. 60/358,580, filed on Feb. 20, 2002.
(60) Provisional application No. 60/358,580, filed on Feb. 20, 2002.
(60) Provisional application No. 60/363,124, filed on Mar. 11, 2002.
(60) Provisional application No. 60/363,124, filed on Mar. 11, 2002.
(60) Provisional application No. 60/386,782, filed on Jun. 6, 2002.
(60) Provisional application No. 60/386,782, filed on Jun. 6, 2002.
(60) Provisional application No. 60/406,784, filed on Aug. 29, 2002.
(60) Provisional application No. 60/406,784, filed on Aug. 29, 2002.
(60) Provisional application No. 60/408,378, filed on Sep. 5, 2002.
(60) Provisional application No. 60/408,378, filed on Sep. 5, 2002.
(60) Provisional application No. 60/409,293, filed on Sep. 9, 2002.
(60) Provisional application No. 60/409,293, filed on Sep. 9, 2002.
(60) Provisional application No. 60/440,129, filed on Jan. 15, 2003.
(60) Provisional application No. 60/440,129, filed on Jan. 15, 2003.
(60) Provisional application No. 60/362,016, filed on Mar. 6, 2002.
(60) Provisional application No. 60/292,217, filed on May 18, 2001.
(60) Provisional application No. 60/306,883, filed on Jul. 20, 2001.
(60) Provisional application No. 60/311,865, filed on Aug. 13, 2001.

(51) Int. Cl. A61K 48/00; C07H 21/02

(52) U.S. Cl. 514/44; 536/23.1

(57) ABSTRACT

This invention relates to compounds, compositions, and methods useful for modulating beta-secretase (BACE), amyloid precurson protein (APP), PIN-1, presenillin 1 (PS-1) and/or presenillin 2 (PS-2)gene expression using short interfering nucleic acid (siNA) molecules. This invention also relates to compounds, compositions, and methods useful for modulating the expression and activity of other genes involved in pathways of BACE, APP, PIN-1, PS-1 and/or PS-2 gene expression and/or activity by RNA interference (RNAi) using small nucleic acid molecules. In particular, the instant invention features small nucleic acid molecules, such as short interfering nucleic acid (siNA), short interfering RNA (siRNA), double-stranded RNA (dsRNA), micro-RNA (miRNA), and short hairpin RNA (shRNA) molecules and methods used to modulate the expression of BACE, APP, PIN-1, PS-1 and/or PS-2 genes.

[0001] This application is a continuation of U.S. Ser. No. 10/877,889, filed Jun. 25, 2004 which is a continuation-in-part of U.S. patent application Ser. No. 10/607,933, filed Jun. 27, 2003, which is a continuation-in-part of U.S. patent application Ser. No. 09/930,423, filed Aug. 15, 2001 and is also a continuation-in-part of International Patent Application No. PCT/US03/04710, filed Feb. 18, 2003, which is a continuation-in-part of U.S. patent application Ser. No. 10/205,309, filed Jul. 25, 2002. This application is also a continuation-in-part of International Patent Application No. PCT/US04/16390, filed May 24, 2004, which is a continuation-in-part of U.S. patent application Ser. No. 10/826,966, filed Apr. 16, 2004, which is continuation-in-part of U.S. patent application Ser. No. 10/757,803, filed Jan. 14, 2004, which is a continuation-in-part of U.S. patent application Ser. No. 10/720,448, filed Nov. 24, 2003, which is a continuation-in-part of U.S. patent application Ser. No. 10/693,059, filed Oct. 23, 2003, which is a continuation-in-part of U.S. patent application Ser. No. 10/444,853, filed May 23, 2003, which is a continuation-in-part of International Patent Application No. PCT/US03/05346, filed Feb. 20, 2003, and a continuation-in-part of International Patent Application No. PCT/US03/05028, filed Feb. 20, 2003, both of which claim the benefit of U.S. Provisional Application No. 60/358,580, filed Feb. 20, 2002, U.S. Provisional Application No. 60/363,124, filed Mar. 11, 2002, U.S. Provisional Application No. 60/386,782, filed Jun. 6, 2002, U.S. Provisional Application No. 60/406,784, filed Aug. 29, 2002, U.S. Provisional Application No. 60/408,378, filed Sep. 5, 2002, U.S. Provisional Application No. 60/409,293, filed Sep. 9, 2002, and U.S. Provisional Application No. 60/440,129, filed Jan. 15, 2003. This application is also a continuation-in-part of International Patent Application No. PCT/US04/13456, filed Apr. 30, 2004, which is a continuation-in-part of patent application Ser. No. 10/780,447, filed Feb. 13, 2004, which is a continuation-in-part of U.S. patent application Ser. No. 10/427,160, filed Apr. 30, 2003, which is a continuation-in-part of International Patent Application No. PCT/US02/15876, filed May 17, 2002, which claims the benefit of U.S. Provisional Application No. 60/362,016, filed Mar. 6, 2002, U.S. Provisional Application No. 60/292,217, filed May 18, 2001, U.S. Provisional Application No. 60/306,883, filed Jul. 20, 2001 and U.S. Provisional Application No. 60/311,865, filed Aug. 13, 2001. This application is also a continuation-in-part of U.S. patent application Ser. No. 10/727,780, filed Dec. 3, 2003. This application also claims the benefit of U.S. Provisional Application No. 60/543,480, filed Feb. 10, 2004. The instant application claims the benefit of all the listed applications, which are hereby incorporated by reference herein in their entireties, including the drawings.

### FIELD OF THE INVENTION

[0002] The present invention relates to compounds, compositions, and methods for the study, diagnosis, and treatment of traits, diseases and conditions associated with Alzheimer's disease. The present invention is also directed to compounds, compositions, and methods relating to traits, diseases and conditions that respond to the modulation of expression and/or activity of genes involved in beta-secretase (BACE), amyloid precursor protein (APP), PIN-1, presenillin 1 (PS-1) and/or presenillin 2 (PS-2) gene expression pathways or other cellular processes that mediate the maintenance or development of such traits, diseases and conditions. Specifically, the invention relates to small nucleic acid molecules, such as short interfering nucleic acid (siNA), short interfering RNA (siRNA), double-stranded RNA (dsRNA), micro-RNA (miRNA), and short hairpin RNA (shRNA) molecules capable of mediating RNA interference (RNAi) against beta-secretase (BACE), amyloid precursor protein (APP), PIN-1, presenillin 1 (PS-1) and/or presenillin 2 (PS-2) gene expression. Such small nucleic acid molecules are useful, for example, in providing compositions for treatment of traits, diseases and conditions that can respond to modulation of beta-secretase (BACE), amyloid precursor protein (APP), PIN-1, presenillin 1 (PS-1) and/or presenillin 2 (PS-2) gene expression in a subject, such as Alzheimer's disease or dementia.

### BACKGROUND OF THE INVENTION

[0003] The following is a discussion of relevant art pertaining to RNAi. The discussion is provided only for understanding of the invention that follows. The summary is not an admission that any of the work described below is prior art to the claimed invention.

[0004] RNA interference refers to the process of sequence-specific post-transcriptional gene silencing in animals mediated by short interfering RNAs (siRNAs) (Zamore et al., 2000, Cell, 101, 25-33; Fire et al., 1998, Nature, 391, 806; Hamilton et al., 1999, Science, 286, 950-951; Lin et al., 1999, Nature, 402, 128-129; Sharp, 1999, Genes & Dev., 13:139-141; and Strauss, 1999, Science, 286, 886). The corresponding process in plants (Heifetz et al., International PCT Publication No. WO 99/61631) is commonly referred to as post-transcriptional gene silencing or RNA silencing and is also referred to as quelling in fungi. The process of post-transcriptional gene silencing is thought to be an evolutionarily-conserved cellular defense mechanism used to prevent the expression of foreign genes and is commonly shared by diverse flora and phyla (Fire et al., 1999, Trends Genet., 15, 358). Such protection from foreign gene expression may have evolved in response to the production of double-stranded RNAs (dsRNAs) derived from viral infection or from the random integration of transposon elements into a host genome via a cellular response that specifically destroys homologous single-stranded RNA or viral genomic RNA. The presence of dsRNA in cells triggers the RNAi response through a mechanism that has yet to be fully characterized. This mechanism appears to be different from other known mechanisms involving double stranded RNA-specific ribonucleases, such as the interferon response that results from dsRNA-mediated activation of protein kinase PKR and 2′,5′-oligoadenylate synthetase resulting in non-specific cleavage of mRNA by ribonuclease L (see for example U.S. Pat. Nos. 6,107,094; 5,898,031; Clemens et al., 1997, J. Interferon & Cytokine Res., 17, 503-524; Adah et al., 2001, Curr. Med. Chem., 8, 1189).

[0005] The presence of long dsRNAs in cells stimulates the activity of a ribonuclease III enzyme referred to as dicer (Bass, 2000, Cell, 101, 235; Zamore et al., 2000, Cell, 101, 25-33; Hammond et al., 2000, Nature, 404, 293). Dicer is involved in the processing of the dsRNA into short pieces of dsRNA known as short interfering RNAs (siRNAs) (Zamore et al., 2000, Cell, 101, 25-33; Bass, 2000, Cell, 101, 235; Berstein et al., 2001, Nature, 409, 363). Short interfering RNAs derived from dicer activity are typically about 21 to about 23 nucleotides in length and comprise about 19 base pair duplexes (Zamore et al., 2000, Cell, 101, 25-33; Elbashir et al, 2001, Genes Dev., 15, 188). Dicer has also been implicated in the excision of 21- and 22-nucleotide small temporal RNAs (stRNAs) from precursor RNA of conserved structure that are implicated in translational control (Hutvagner et al., 2001, Science, 293, 834). The RNAi response also features an endonuclease complex, commonly referred to as an RNA-induced silencing complex (RISC), which mediates cleavage of single-stranded RNA having sequence complementary to the antisense strand of the siRNA duplex. Cleavage of the target RNA takes place in the middle of the region complementary to the antisense strand of the siRNA duplex (Elbashir et al., 2001, Genes Dev., 15, 188).

[0006] RNAi has been studied in a variety of systems. Fire et al., 1998, Nature, 391, 806, were the first to observe RNAi in C. elegans. Bahramian and Zarbl, 1999, Molecular and Cellular Biology, 19, 274-283 and Wianny and Goetz, 1999, Nature Cell Biol, 2, 70, describe RNAi mediated by dsRNA in mammalian systems. Hammond et al., 2000, Nature, 404, 293, describe RNAi in Drosophila cells transfected with dsRNA. Elbashir et al., 2001, Nature, 411, 494 and Tuschl et al., International PCT Publication No. WO 01/75164, describe RNAi induced by introduction of duplexes of synthetic 21-nucleotide RNAs in cultured mammalian cells including human embryonic kidney and HeLa cells. Recent work in Drosophila embryonic lysates (Elbashir et al., 2001, EMBO J., 20, 6877 and Tuschl et al., International PCT Publication No. WO 01/75164) has revealed certain requirements for siRNA length, structure, chemical composition, and sequence that are essential to mediate efficient RNAi activity. These studies have shown that 21-nucleotide siRNA duplexes are most active when containing 3′-terminal dinucleotide overhangs. Furthermore, complete substitution of one or both siRNA strands with 2′-deoxy (2′-H) or 2′-O-methyl nucleotides abolishes RNAi activity, whereas substitution of the 3′-terminal siRNA overhang nucleotides with 2′-deoxy nucleotides (2′-H) was shown to be tolerated. Single mismatch sequences in the center of the siRNA duplex were also shown to abolish RNAi activity. In addition, these studies also indicate that the position of the cleavage site in the target RNA is defined by the 5′-end of the siRNA guide sequence rather than the 3′-end of the guide sequence (Elbashir et al., 2001, EMBO J., 20, 6877). Other studies have indicated that a 5′-phosphate on the target-complementary strand of a siRNA duplex is required for siRNA activity and that ATP is utilized to maintain the 5′-phosphate moiety on the siRNA (Nykanen et al., 2001, Cell, 107, 309).

[0007] Studies have shown that replacing the 3′-terminal nucleotide overhanging segments of a 21-mer siRNA duplex having two-nucleotide 3′-overhangs with deoxyribonucleotides does not have an adverse effect on RNAi activity. Replacing up to four nucleotides on each end of the siRNA with deoxyribonucleotides has been reported to be well tolerated, whereas complete substitution with deoxyribonucleotides results in no RNAi activity (Elbashir et al., 2001, EMBO J., 20, 6877 and Tuschl et al., International PCT Publication No. WO 01/75164). In addition, Elbashir et al., supra, also report that substitution of siRNA with 2′-O-methyl nucleotides completely abolishes RNAi activity. Li et al, International PCT Publication No. WO 00/44914, and Beach et al., International PCT Publication No. WO 01/68836 preliminarily suggest that siRNA may include modifications to either the phosphate-sugar backbone or the nucleoside to include at least one of a nitrogen or sulfur heteroatom, however, neither application postulates to what extent such modifications would be tolerated in siRNA molecules, nor provides any further guidance or examples of such modified siRNA. Kreutzer et al., Canadian Patent Application No. 2,359,180, also describe certain chemical modifications for use in dsRNA constructs in order to counteract activation of double-stranded RNA-dependent protein kinase PKR, specifically 2′-amino or 2′-O-methyl nucleotides, and nucleotides containing a 2′-O or 4′-C methylene bridge. However, Kreutzer et al. similarly fails to provide examples or guidance as to what extent these modifications would be tolerated in dsRNA molecules.

[0008] Parrish et al., 2000, Molecular Cell, 6, 1077-1087, tested certain chemical modifications targeting the unc-22 gene in C. elegans using long (>25 nt) siRNA transcripts. The authors describe the introduction of thiophosphate residues into these siRNA transcripts by incorporating thiophosphate nucleotide analogs with T7 and T3 RNA polymerase and observed that RNAs with two phosphorothioate modified bases also had substantial decreases in effectiveness as RNAi. Further, Parrish et al. reported that phosphorothioate modification of more than two residues greatly destabilized the RNAs in vitro such that interference activities could not be assayed. Id. at 1081. The authors also tested certain modifications at the 2′-position of the nucleotide sugar in the long siRNA transcripts and found that substituting deoxynucleotides for ribonucleotides produced a substantial decrease in interference activity, especially in the case of Uridine to Thymidine and/or Cytidine to deoxy-Cytidine substitutions. Id. In addition, the authors tested certain base modifications, including substituting, in sense and antisense strands of the siRNA, 4-thiouracil, 5-bromouracil, 5-iodouracil, and 3-(aminoallyl)uracil for uracil, and inosine for guanosine. Whereas 4-thiouracil and 5-bromouracil substitution appeared to be tolerated, Parrish reported that inosine produced a substantial decrease in interference activity when incorporated in either strand. Parrish also reported that incorporation of 5-iodouracil and 3-(aminoallyl)uracil in the antisense strand resulted in a substantial decrease in RNAi activity as well.

[0009] The use of longer dsRNA has been described. For example, Beach et al., International PCT Publication No. WO 01/68836, describes specific methods for attenuating gene expression using endogenously-derived dsRNA. Tuschl et al., International PCT Publication No. WO 01/75164, describe a Drosophila in vitro RNAi system and the use of specific siRNA molecules for certain functional genomic and certain therapeutic applications; although Tuschl, 2001, Chem. Biochem., 2, 239-245, doubts that RNAi can be used to cure genetic diseases or viral infection due to the danger of activating interferon response. Li et al., International PCT Publication No. WO 00/44914, describe the use of specific long (141 bp-488 bp) enzymatically synthesized or vector expressed dsRNAs for attenuating the expression of certain target genes. Zernicka-Goetz et al., International PCT Publication No. WO 01/36646, describe certain methods for inhibiting the expression of particular genes in mammalian cells using certain long (550 bp-714 bp), enzymatically synthesized or vector expressed dsRNA molecules. Fire et al., International PCT Publication No. WO 99/32619, describe particular methods for introducing certain long dsRNA molecules into cells for use in inhibiting gene expression in nematodes. Plaetinck et al., International PCT Publication No. WO 00/01846, describe certain methods for identifying specific genes responsible for conferring a particular phenotype in a cell using specific long dsRNA molecules. Mello et al., International PCT Publication No. WO 01/29058, describe the identification of specific genes involved in dsRNA-mediated RNAi. Pachuck et al., International PCT Publication No. WO 00/63364, describe certain long (at least 200 nucleotide) dsRNA constructs. Deschamps Depaillette et al., International PCT Publication No. WO 99/07409, describe specific compositions consisting of particular dsRNA molecules combined with certain anti-viral agents. Waterhouse et al., International PCT Publication No. 99/53050 and 1998, PNAS, 95, 13959-13964, describe certain methods for decreasing the phenotypic expression of a nucleic acid in plant cells using certain dsRNAs. Driscoll et al., International PCT Publication No. WO 01/49844, describe specific DNA expression constructs for use in facilitating gene silencing in targeted organisms.

[0010] Others have reported on various RNAi and gene-silencing systems. For example, Parrish et al., 2000, Molecular Cell, 6, 1077-1087, describe specific chemically-modified dsRNA constructs targeting the unc-22 gene of C. elegans. Grossniklaus, International PCT Publication No. WO 01/38551, describes certain methods for regulating polycomb gene expression in plants using certain dsRNAs. Churikov et al., International PCT Publication No. WO 01/42443, describe certain methods for modifying genetic characteristics of an organism using certain dsRNAs. Cogoni et al, International PCT Publication No. WO 01/53475, describe certain methods for isolating a Neurospora silencing gene and uses thereof. Reed et al., International PCT Publication No. WO 01/68836, describe certain methods for gene silencing in plants. Honer et al., International PCT Publication No. WO 01/70944, describe certain methods of drug screening using transgenic nematodes as Parkinson's Disease models using certain dsRNAs. Deak et al., International PCT Publication No. WO 01/72774, describe certain Drosophila-derived gene products that may be related to RNAi in Drosophila. Arndt et al., International PCT Publication No. WO 01/92513 describe certain methods for mediating gene suppression by using factors that enhance RNAi. Tuschl et al., International PCT Publication No. WO 02/44321, describe certain synthetic siRNA constructs. Pachuk et al., International PCT Publication No. WO 00/63364, and Satishchandran et al., International PCT Publication No. WO 01/04313, describe certain methods and compositions for inhibiting the function of certain polynucleotide sequences using certain long (over 250 bp), vector expressed dsRNAs. Echeverri et al., International PCT Publication No. WO 02/38805, describe certain C. elegans genes identified via RNAi. Kreutzer et al., International PCT Publications Nos. WO 02/055692, WO 02/055693, and EP 1144623 BI describes certain methods for inhibiting gene expression using dsRNA. Graham et al., International PCT Publications Nos. WO 99/49029 and WO 01/70949, and AU 4037501 describe certain vector expressed siRNA molecules. Fire et al., U.S. Pat. No. 6,506,559, describe certain methods for inhibiting gene expression in vitro using certain long dsRNA (299 bp-1033 bp) constructs that mediate RNAi. Martinez et al., 2002, Cell, 110, 563-574, describe certain single stranded siRNA constructs, including certain 5′-phosphorylated single stranded siRNAs that mediate RNA interference in Hela cells. Harborth et al., 2003, Antisense & Nucleic Acid Drug Development, 13, 83-105, describe certain chemically and structurally modified siRNA molecules. Chiu and Rana, 2003, RNA, 9, 1034-1048, describe certain chemically and structurally modified siRNA molecules. Woolf et al., International PCT Publication Nos. WO 03/064626 and WO 03/064625 describe certain chemically modified dsRNA constructs.

[0011] McSwiggen et al., International PCT Publication No. WO 01/16312, describes nucleic acid mediated inhibition of BACE, PS-1, and PS-2 expression.

### SUMMARY OF THE INVENTION

[0012] This invention relates to compounds, compositions, and methods useful for modulating the expression of genes associated with the maintenance or development of Alzheimer's disease and/or dementia, for example, beta-secretase (BACE), amyloid precursor protein (APP), PIN-1, presenillin 1 (PS-1) and/or presenillin 2 (PS-2) gene expression using short interfering nucleic acid (siNA) molecules. This invention also relates to compounds, compositions, and methods useful for modulating the expression and activity of other genes involved in pathways of BACE, APP, PIN-1, PS-1 and/or PS-2 gene expression and/or activity by RNA interference (RNAi) using small nucleic acid molecules. In particular, the instant invention features small nucleic acid molecules, such as short interfering nucleic acid (siNA), short interfering RNA (siRNA), double-stranded RNA (dsRNA), micro-RNA (miRNA), and short hairpin RNA (shRNA) molecules and methods used to modulate the expression of BACE, APP, PIN-1, PS-1 and/or PS-2 genes or other genes associated with the maintenance or development of Alzheimer's disease and/or dementia.

[0013] A siNA of the invention can be unmodified or chemically-modified. A siNA of the instant invention can be chemically synthesized, expressed from a vector or enzymatically synthesized. The instant invention also features various chemically-modified synthetic short interfering nucleic acid (siNA) molecules capable of modulating BACE, APP, PIN-1, PS-1 and/or PS-2 gene expression or activity in cells by RNA interference (RNAi). The use of chemically-modified siNA improves various properties of native siNA molecules through increased resistance to nuclease degradation in vivo and/or through improved cellular uptake. Further, contrary to earlier published studies, siNA having multiple chemical modifications retains its RNAi activity. The siNA molecules of the instant invention provide useful reagents and methods for a variety of therapeutic, diagnostic, target validation, genomic discovery, genetic engineering, and pharmacogenomic applications.

[0014] In one embodiment, the invention features one or more siNA molecules and methods that independently or in combination modulate the expression of BACE, APP, PIN-1, PS-1 and/or PS-2 genes encoding proteins, such as proteins comprising BACE, APP, PIN-1, PS-1 and/or PS-2 associated with the maintenance and/or development of Alzheimer's disease and other neurodegenerative disorders or conditions such as dementia and stroke/cardiovascular accident (CVA), such as genes encoding sequences comprising those sequences referred to by GenBank Accession Nos. shown in Table I, referred to herein generally as BACE, APP, PIN-1, PS-1 and/or PS-2. The description below of the various aspects and embodiments of the invention is provided with reference to exemplary BACE gene referred to herein as BACE. However, the various aspects and embodiments are also directed to other BACE genes, such as BACE homolog genes, transcript variants and polymorphisms (e.g., single nucleotide polymorphism, (SNPs)) associated with certain BACE genes. As such, the various aspects and embodiments are also directed to other genes which express other BACE related proteins or other proteins associated with Alzheimer's disease, such as APP, PIN-1, PS-1 and/or PS-2, including mutant genes and splice variants thereof. The various aspects and embodiments are also directed to other genes that are involved in BACE, APP, PIN-1, PS-1 and/or PS-2 mediated pathways of signal transduction or gene expression that are involved, for example, in the progression, development, or maintenance of disease (e.g., Alzheimer's disease). These additional genes can be analyzed for target sites using the methods described for BACE genes herein. Thus, the modulation of other genes and the effects of such modulation of the other genes can be performed, determined, and measured as described herein.

[0015] In one embodiment, the invention features a double-stranded short interfering nucleic acid (siNA) molecule that down-regulates expression of a BACE gene, wherein said siNA molecule comprises about 18 to about 21 base pairs.

[0016] In one embodiment, the invention features a double stranded short interfering nucleic acid (siNA) molecule that directs cleavage of BACE RNA via RNA interference (RNAi), wherein the double stranded siNA molecule comprises a first and a second strand, each strand of the siNA molecule is about 18 to about 23 nucleotides in length, the first strand of the siNA molecule comprises nucleotide sequence having sufficient complementarity to the BACE RNA for the siNA molecule to direct cleavage of the BACE RNA via RNA interference, and the second strand of said siNA molecule comprises nucleotide sequence that is complementary to the first strand.

[0017] In one embodiment, the invention features a chemically synthesized double stranded short interfering nucleic acid (siNA) molecule that directs cleavage of a BACE RNA via RNA interference (RNAi), wherein each strand of the siNA molecule is about 18 to about 23 nucleotides in length; and one strand of the siNA molecule comprises nucleotide sequence having sufficient complementarity to the BACE RNA for the siNA molecule to direct cleavage of the BACE RNA via RNA interference.

[0018] In one embodiment, the invention features a siNA molecule that down-regulates expression of a BACE gene, for example, wherein the BACE gene comprises BACE encoding sequence. In one embodiment, the invention features a siNA molecule that down-regulates expression of a BACE gene, for example, wherein the BACE gene comprises BACE non-coding sequence or regulatory elements involved in BACE gene expression.

[0019] In one embodiment, a siNA of the invention is used to inhibit the expression of BACE genes or a BACE gene family, wherein the genes or gene family sequences share sequence homology. Such homologous sequences can be identified as is known in the art, for example using sequence alignments. siNA molecules can be designed to target such homologous sequences, for example using perfectly complementary sequences or by incorporating non-canonical base pairs, for example mismatches and/or wobble base pairs, that can provide additional target sequences. In instances where mismatches are identified, non-canonical base pairs (for example, mismatches and/or wobble bases) can be used to generate siNA molecules that target more than one gene sequence. In a non-limiting example, non-canonical base pairs such as UU and CC base pairs are used to generate siNA molecules that are capable of targeting sequences for differing BACE targets that share sequence homology. As such, one advantage of using siNAs of the invention is that a single siNA can be designed to include nucleic acid sequence that is complementary to the nucleotide sequence that is conserved between the homologous genes. In this approach, a single siNA can be used to inhibit expression of more than one gene instead of using more than one siNA molecule to target the different genes.

[0020] In one embodiment, the invention features a siNA molecule having RNAi activity against BACE RNA, wherein the siNA molecule comprises a sequence complementary to any RNA having BACE encoding sequence, such as those sequences having GenBank Accession Nos. shown in Table I. In another embodiment, the invention features a siNA molecule having RNAi activity against BACE RNA, wherein the siNA molecule comprises a sequence complementary to an RNA having variant BACE encoding sequence, for example other mutant BCAE genes not shown in Table I but known in the art to be associated with the maintenance and/or development of Alzheimer's disease and/or dementia. Chemical modifications as shown in Tables III and IV or otherwise described herein can be applied to any siNA construct of the invention. In another embodiment, a siNA molecule of the invention includes a nucleotide sequence that can interact with nucleotide sequence of a BACE gene and thereby mediate silencing of BACE gene expression, for example, wherein the siNA mediates regulation of BACE gene expression by cellular processes that modulate the chromatin structure or methylation patterns of the BACE gene and prevent transcription of the BACE gene.

[0021] In one embodiment, siNA molecules of the invention are used to down regulate or inhibit the expression of BACE proteins arising from BACE haplotype polymorphisms that are associated with a disease or condition, (e.g., Alzheimer's disease and other neurodegenerative disorders or conditions such as dementia and stroke/cardiovascular accident (CVA)). Analysis of BACE genes, or BACE protein or RNA levels can be used to identify subjects with such polymorphisms or those subjects who are at risk of developing traits, conditions, or diseases described herein. These subjects are amenable to treatment, for example, treatment with siNA molecules of the invention and any other composition useful in treating diseases related to BACE gene expression. As such, analysis of BACE protein or RNA levels can be used to determine treatment type and the course of therapy in treating a subject. Monitoring of BACE protein or RNA levels can be used to predict treatment outcome and to determine the efficacy of compounds and compositions that modulate the level and/or activity of certain BACE proteins associated with a trait, condition, or disease.

[0022] In one embodiment of the invention a siNA molecule comprises an antisense strand comprising a nucleotide sequence that is complementary to a nucleotide sequence or a portion thereof encoding a BACE protein. The siNA further comprises a sense strand, wherein said sense strand comprises a nucleotide sequence of a BACE gene or a portion thereof.

[0023] In another embodiment, a siNA molecule comprises an antisense region comprising a nucleotide sequence that is complementary to a nucleotide sequence encoding a BACE protein or a portion thereof. The siNA molecule further comprises a sense region, wherein said sense region comprises a nucleotide sequence of a BACE gene or a portion thereof.

[0024] In another embodiment, the invention features a siNA molecule comprising a nucleotide sequence in the antisense region of the siNA molecule that is complementary to a nucleotide sequence or portion of sequence of a BACE gene. In another embodiment, the invention features a siNA molecule comprising a region, for example, the antisense region of the siNA construct, complementary to a sequence comprising a BACE gene sequence or a portion thereof.

[0025] In one embodiment, the antisense region of BACE siNA constructs comprises a sequence complementary to sequence having any of SEQ ID NOs. 399-723, 1471-1478, 1591-1598, 1607-1614, 1623-1630, 1639-1646, 1655-1662, 1687, or 1689. In one embodiment, the antisense region of BACE constructs comprises sequence having any of SEQ ID NOs. 724-1048, 1599-1606, 1615-1622, 1631-1638, 1647-1654, 1663-1686, 1688, 1690, 1884, 1886, 1888, 1891, 1893, 1895, 1897, or 1900. In another embodiment, the sense region of BACE constructs comprises sequence having any of SEQ ID NOs. 399-723, 1471-1478, 1591-1598, 1607-1614, 1623-1630, 1639-1646, 1655-1662, 1687, 1689, 1883, 1885, 1887, 1889, 1890, 1892, 1894, 1896, 1898, or 1899.

[0026] In one embodiment, the antisense region of APP siNA constructs comprises a sequence complementary to sequence having any of SEQ ID NOs. 1-199, 1463-1470, 1495-1502, 1511-1518, 1527-1534, 1543-1550, or 1559-1566. In one embodiment, the antisense region of APP constructs comprises sequence having any of SEQ ID NOs. 200-398, 1503-1510, 1519-1526, 1535-1542, 1551-1558, 1567-1590, 1884, 1886, 1888, or 1891. In another embodiment, the sense region of APP constructs comprises sequence having any of SEQ ID NOs. 1-199, 1463-1470, 1495-1502, 1511-1518, 1527-1534, 1543-1550, 1559-1566, 1883, 1885, 1887, 1889, or 1890.

[0027] In one embodiment, the antisense region of PSEN1 siNA constructs comprises a sequence complementary to sequence having any of SEQ ID NOs. 1049-1131, 1479-1486, 1691-1698, 1707-1714, 1723-1730, 1739-1746, 1755-1762. In one embodiment, the antisense region of PSEN1 constructs comprises sequence having any of SEQ ID NOs. 1132-1214, 1699-1706, 1715-1722, 1731-1738, 1747-1754, 1763-1786, 1884, 1886, 1888, or 1891. In another embodiment, the sense region of PSEN1 constructs comprises sequence having any of SEQ ID NOs. 1049-1131, 1479-1486, 1691-1698, 1707-1714, 1723-1730, 1739-1746, 1755-1762, 1883, 1885, 1887, 1889, or 1890.

[0028] In one embodiment, the antisense region of PSEN2 siNA constructs comprises a sequence complementary to sequence having any of SEQ ID NOs. 1215-1338, 1487-1494, 1787-1794, 1803-1810, 1819-1826, 1835-1842, 1851-1858. In one embodiment, the antisense region of PSEN2 constructs comprises sequence having any of SEQ ID NOs. 1339-1462, 1795-1802, 1811-1818, 1827-1834, 1843-1850, 1859-1882, 1884, 1886, 1888, or 1891. In another embodiment, the sense region of PSEN2 constructs comprises sequence having any of SEQ ID NOs. SEQ ID NOs. 1215-1338, 1487-1494, 1787-1794, 1803-1810, 1819-1826, 1835-1842, 1851-1858, 1883, 1885, 1887, 1889, or 1890.

[0029] In one embodiment, a siNA molecule of the invention comprises any of SEQ ID NOs. 1-1900. The sequences shown in SEQ ID NOs: 1-1900 are not limiting. A siNA molecule of the invention can comprise any contiguous BACE sequence (e.g., about 18 to about 25, or about 18, 19, 20, 21, 22, 23, 24, or 25 contiguous BACE nucleotides).

[0030] In yet another embodiment, the invention features a siNA molecule comprising a sequence, for example, the antisense sequence of the siNA construct, complementary to a sequence or portion of sequence comprising sequence represented by GenBank Accession Nos. shown in Table I. Chemical modifications in Tables III and IV and described herein can be applied to any siNA construct of the invention.

[0031] In one embodiment of the invention a siNA molecule comprises an antisense strand having about 18 to about 29 (e.g., about 18, 19, 20, 21, 22, 23, 24, 25, 26, 27, 28, or 29) nucleotides, wherein the antisense strand is complementary to a RNA sequence encoding a BACE protein, and wherein said siNA further comprises a sense strand having about 18 to about 29 (e.g., about 18, 19, 20, 21, 22, 23, 24, 25, 26, 27, 28, or 29) nucleotides, and wherein said sense strand and said antisense strand are distinct nucleotide sequences with at least about 18 complementary nucleotides.

[0032] In another embodiment of the invention a siNA molecule of the invention comprises an antisense region having about 18 to about 29 (e.g., about 18, 19, 20, 21, 22, 23, 24, 25, 26, 27, 28, or 29) nucleotides, wherein the antisense region is complementary to a RNA sequence encoding a BACE protein, and wherein said siNA further comprises a sense region having about 18 to about 29 (e.g., about 18, 19, 20, 21, 22, 23, 24, 25, 26, 27, 28, or 29) nucleotides, wherein said sense region and said antisense region comprise a linear molecule with at least about 19 complementary nucleotides.

[0033] In one embodiment, a siNA molecule of the invention has RNAi activity that modulates expression of RNA encoded by a BACE gene. Because BACE genes can share some degree of sequence homology with each other, siNA molecules can be designed to target a class of BACE genes or alternately specific BACE genes (e.g., polymorphic variants) by selecting sequences that are either shared amongst different BACE targets or alternatively that are unique for a specific BACE target. Therefore, in one embodiment, the siNA molecule can be designed to target conserved regions of BACE RNA sequences having homology among several BACE gene variants so as to target a class of BACE genes with one siNA molecule. Accordingly, in one embodiment, the siNA molecule of the invention modulates the expression of one or both BACE alleles in a subject. In another embodiment, the siNA molecule can be designed to target a sequence that is unique to a specific BACE RNA sequence (e.g., a single BACE allele or BACE single nucleotide polymorphism (SNP)) due to the high degree of specificity that the siNA molecule requires to mediate RNAi activity.

[0034] In one embodiment, nucleic acid molecules of the invention that act as mediators of the RNA interference gene silencing response are double-stranded nucleic acid molecules. In another embodiment, the siNA molecules of the invention consist of duplex nucleic acid molecules containing about 18 base pairs between oligonucleotides comprising about 18 to about 25 (e.g., about 18, 19, 20, 21, 22, 23, 24, or 25) nucleotides. In yet another embodiment, siNA molecules of the invention comprise duplex nucleic acid molecules with overhanging ends of about about 1 to about 3 (e.g., about 1, 2, or 3) nucleotides, for example, about 21-nucleotide duplexes with about 18 base pairs and 3′-terminal mononucleotide, dinucleotide, or trinucleotide overhangs.

[0035] In one embodiment, the invention features one or more chemically-modified siNA constructs having specificity for BACE expressing nucleic acid molecules, such as RNA encoding a BACE protein. In one embodiment, the invention features a RNA based siNA molecule (e.g., a siNA comprising 2′-OH nucleotides) having specificity for BACE expressing nucleic acid molecules that includes one or more chemical modifications described herein. Non-limiting examples of such chemical modifications include without limitation phosphorothioate internucleotide linkages, 2′-deoxyribonucleotides, 2′-O-methyl ribonucleotides, 2′-deoxy-2′-fluoro ribonucleotides, “universal base” nucleotides, “acyclic” nucleotides, 5-C-methyl nucleotides, and terminal glyceryl and/or inverted deoxy abasic residue incorporation. These chemical modifications, when used in various siNA constructs, (e.g., RNA based siNA constructs), are shown to preserve RNAi activity in cells while at the same time, dramatically increasing the serum stability of these compounds. Furthermore, contrary to the data published by Parrish et al., supra, applicant demonstrates that multiple (greater than one) phosphorothioate substitutions are well-tolerated and confer substantial increases in serum stability for modified siNA constructs.

[0036] In one embodiment, a siNA molecule of the invention comprises modified nucleotides while maintaining the ability to mediate RNAi. The modified nucleotides can be used to improve in vitro or in vivo characteristics such as stability, activity, and/or bioavailability. For example, a siNA molecule of the invention can comprise modified nucleotides as a percentage of the total number of nucleotides present in the siNA molecule. As such, a siNA molecule of the invention can generally comprise about 5% to about 100% modified nucleotides (e.g., about 5%, 10%, 15%, 20%, 25%, 30%, 35%, 40%, 45%, 50%, 55%, 60%, 65%, 70%, 75%, 80%, 85%, 90%, 95% or 100% modified nucleotides). The actual percentage of modified nucleotides present in a given siNA molecule will depend on the total number of nucleotides present in the siNA. If the siNA molecule is single stranded, the percent modification can be based upon the total number of nucleotides present in the single stranded siNA molecules. Likewise, if the siNA molecule is double stranded, the percent modification can be based upon the total number of nucleotides present in the sense strand, antisense strand, or both the sense and antisense strands.

[0037] One aspect of the invention features a double-stranded short interfering nucleic acid (siNA) molecule that down-regulates expression of a BACE gene. In one embodiment, the double stranded siNA molecule comprises one or more chemical modifications and each strand of the double-stranded siNA is about 21 nucleotides long. In one embodiment, the double-stranded siNA molecule does not contain any ribonucleotides. In another embodiment, the double-stranded siNA molecule comprises one or more ribonucleotides. In one embodiment, each strand of the double-stranded siNA molecule comprises about 18 to about 29 (e.g., about 18, 19, 20, 21, 22, 23, 24, 25, 26, 27, 28, or 29) nucleotides, wherein each strand comprises about 18 nucleotides that are complementary to the nucleotides of the other strand. In one embodiment, one of the strands of the double-stranded siNA molecule comprises a nucleotide sequence that is complementary to a nucleotide sequence or a portion thereof of the BACE gene, and the second strand of the double-stranded siNA molecule comprises a nucleotide sequence substantially similar to the nucleotide sequence of the BACE gene or a portion thereof.

[0038] In another embodiment, the invention features a double-stranded short interfering nucleic acid (siNA) molecule that down-regulates expression of a BACE gene comprising an antisense region, wherein the antisense region comprises a nucleotide sequence that is complementary to a nucleotide sequence of the BACE gene or a portion thereof, and a sense region, wherein the sense region comprises a nucleotide sequence substantially similar to the nucleotide sequence of the BACE gene or a portion thereof. In one embodiment, the antisense region and the sense region each comprise about 18 to about 23 (e.g. about 18, 19, 20, 21, 22, or 23) nucleotides, wherein the antisense region comprises about 18 nucleotides that are complementary to nucleotides of the sense region.

[0039] In another embodiment, the invention features a double-stranded short interfering nucleic acid (siNA) molecule that down-regulates expression of a BACE gene comprising a sense region and an antisense region, wherein the antisense region comprises a nucleotide sequence that is complementary to a nucleotide sequence of RNA encoded by the BACE gene or a portion thereof and the sense region comprises a nucleotide sequence that is complementary to the antisense region.

[0040] In one embodiment, a siNA molecule of the invention comprises blunt ends, i.e., ends that do not include any overhanging nucleotides. For example, a siNA molecule comprising modifications described herein (e.g., comprising nucleotides having Formulae I-VII or siNA constructs comprising “Stab 00”-“Stab 25” (Table IV) or any combination thereof (see Table IV)) and/or any length described herein can comprise blunt ends or ends with no overhanging nucleotides.

[0041] In one embodiment, any siNA molecule of the invention can comprise one or more blunt ends, i.e. where a blunt end does not have any overhanging nucleotides. In one embodiment, the blunt ended siNA molecule has a number of base pairs equal to the number of nucleotides present in each strand of the siNA molecule. In another embodiment, the siNA molecule comprises one blunt end, for example wherein the 5′-end of the antisense strand and the 3′-end of the sense strand do not have any overhanging nucleotides. In another example, the siNA molecule comprises one blunt end, for example wherein the 3′-end of the antisense strand and the 5′-end of the sense strand do not have any overhanging nucleotides. In another example, a siNA molecule comprises two blunt ends, for example wherein the 3′-end of the antisense strand and the 5′-end of the sense strand as well as the 5′-end of the antisense strand and 3′-end of the sense strand do not have any overhanging nucleotides. A blunt ended siNA molecule can comprise, for example, from about 18 to about 30 nucleotides (e.g., about 18, 19, 20, 21, 22, 23, 24, 25, 26, 27, 28, 29, or 30 nucleotides). Other nucleotides present in a blunt ended siNA molecule can comprise, for example, mismatches, bulges, loops, or wobble base pairs to modulate the activity of the siNA molecule to mediate RNA interference.

[0042] By “blunt ends” is meant symmetric termini or termini of a double stranded siNA molecule having no overhanging nucleotides. The two strands of a double stranded siNA molecule align with each other without over-hanging nucleotides at the termini. For example, a blunt ended siNA construct comprises terminal nucleotides that are complementary between the sense and antisense regions of the siNA molecule.

[0043] In one embodiment, the invention features a double-stranded short interfering nucleic acid (siNA) molecule that down-regulates expression of a BACE gene, wherein the siNA molecule is assembled from two separate oligonucleotide fragments wherein one fragment comprises the sense region and the second fragment comprises the antisense region of the siNA molecule. The sense region can be connected to the antisense region via a linker molecule, such as a polynucleotide linker or a non-nucleotide linker.

[0044] In one embodiment, the invention features double-stranded short interfering nucleic acid (siNA) molecule that down-regulates expression of a BACE gene, wherein the siNA molecule comprises about 18 to about 21 base pairs, and wherein each strand of the siNA molecule comprises one or more chemical modifications. In another embodiment, one of the strands of the double-stranded siNA molecule comprises a nucleotide sequence that is complementary to a nucleotide sequence of a BACE gene or a portion thereof, and the second strand of the double-stranded siNA molecule comprises a nucleotide sequence substantially similar to the nucleotide sequence or a portion thereof of the BACE gene. In another embodiment, one of the strands of the double-stranded siNA molecule comprises a nucleotide sequence that is complementary to a nucleotide sequence of a BACE gene or portion thereof, and the second strand of the double-stranded siNA molecule comprises a nucleotide sequence substantially similar to the nucleotide sequence or portion thereof of the BACE gene. In another embodiment, each strand of the siNA molecule comprises about 18 to about 23 nucleotides, and each strand comprises at least about 18 nucleotides that are complementary to the nucleotides of the other strand. The BACE gene can comprise, for example, sequences referred to in Table I.

[0045] In one embodiment, a siNA molecule of the invention comprises no ribonucleotides. In another embodiment, a siNA molecule of the invention comprises ribonucleotides.

[0046] In one embodiment, a siNA molecule of the invention comprises an antisense region comprising a nucleotide sequence that is complementary to a nucleotide sequence of a BACE gene or a portion thereof, and the siNA further comprises a sense region comprising a nucleotide sequence substantially similar to the nucleotide sequence of the BACE gene or a portion thereof. In another embodiment, the antisense region and the sense region each comprise about 18 to about 23 nucleotides and the antisense region comprises at least about 18 nucleotides that are complementary to nucleotides of the sense region. The BACE gene can comprise, for example, sequences referred to in Table I.

[0047] In one embodiment, a siNA molecule of the invention comprises a sense region and an antisense region, wherein the antisense region comprises a nucleotide sequence that is complementary to a nucleotide sequence of RNA encoded by a BACE gene, or a portion thereof, and the sense region comprises a nucleotide sequence that is complementary to the antisense region. In one embodiment, the siNA molecule is assembled from two separate oligonucleotide fragments, wherein one fragment comprises the sense region and the second fragment comprises the antisense region of the siNA molecule. In another embodiment, the sense region is connected to the antisense region via a linker molecule. In another embodiment, the sense region is connected to the antisense region via a linker molecule, such as a nucleotide or non-nucleotide linker. The BACE gene can comprise, for example, sequences referred in to Table I.

[0048] In one embodiment, the invention features a double-stranded short interfering nucleic acid (siNA) molecule that down-regulates expression of a BACE gene comprising a sense region and an antisense region, wherein the antisense region comprises a nucleotide sequence that is complementary to a nucleotide sequence of RNA encoded by the BACE gene or a portion thereof and the sense region comprises a nucleotide sequence that is complementary to the antisense region, and wherein the siNA molecule has one or more modified pyrimidine and/or purine nucleotides. In one embodiment, the pyrimidine nucleotides in the sense region are 2′-O-methyl pyrimidine nucleotides or 2′-deoxy-2′-fluoro pyrimidine nucleotides and the purine nucleotides present in the sense region are 2′-deoxy purine nucleotides. In another embodiment, the pyrimidine nucleotides in the sense region are 2′-deoxy-2′-fluoro pyrimidine nucleotides and the purine nucleotides present in the sense region are 2′-O-methyl purine nucleotides. In another embodiment, the pyrimidine nucleotides in the sense region are 2′-deoxy-2′-fluoro pyrimidine nucleotides and the purine nucleotides present in the sense region are 2′-deoxy purine nucleotides. In one embodiment, the pyrimidine nucleotides in the antisense region are 2′-deoxy-2′-fluoro pyrimidine nucleotides and the purine nucleotides present in the antisense region are 2′-O-methyl or 2′-deoxy purine nucleotides. In another embodiment of any of the above-described siNA molecules, any nucleotides present in a non-complementary region of the sense strand (e.g. overhang region) are 2′-deoxy nucleotides.

[0049] In one embodiment, the invention features a double-stranded short interfering nucleic acid (siNA) molecule that down-regulates expression of a BACE gene, wherein the siNA molecule is assembled from two separate oligonucleotide fragments wherein one fragment comprises the sense region and the second fragment comprises the antisense region of the siNA molecule, and wherein the fragment comprising the sense region includes a terminal cap moiety at the 5′-end, the 3′-end, or both of the 5′ and 3′ ends of the fragment. In one embodiment, the terminal cap moiety is an inverted deoxy abasic moiety or glyceryl moiety. In one embodiment, each of the two fragments of the siNA molecule comprise about 21 nucleotides.

[0050] In one embodiment, the invention features a siNA molecule comprising at least one modified nucleotide, wherein the modified nucleotide is a 2′-deoxy-2′-fluoro nucleotide. The siNA can be, for example, of length between about 12 and about 36 nucleotides. In one embodiment, all pyrimidine nucleotides present in the siNA are 2′-deoxy-2′-fluoro pyrimidine nucleotides. In one embodiment, the modified nucleotides in the siNA include at least one 2′-deoxy-2′-fluoro cytidine or 2′-deoxy-2′-fluoro uridine nucleotide. In another embodiment, the modified nucleotides in the siNA include at least one 2′-fluoro cytidine and at least one 2′-deoxy-2′-fluoro uridine nucleotides. In one embodiment, all uridine nucleotides present in the siNA are 2′-deoxy-2′-fluoro uridine nucleotides. In one embodiment, all cytidine nucleotides present in the siNA are 2′-deoxy-2′-fluoro cytidine nucleotides. In one embodiment, all adenosine nucleotides present in the siNA are 2′-deoxy-2′-fluoro adenosine nucleotides. In one embodiment, all guanosine nucleotides present in the siNA are 2′-deoxy-2′-fluoro guanosine nucleotides. The siNA can further comprise at least one modified internucleotidic linkage, such as phosphorothioate linkage. In one embodiment, the 2′-deoxy-2′-fluoronucleotides are present at specifically selected locations in the siNA that are sensitive to cleavage by ribonucleases, such as locations having pyrimidine nucleotides.

[0051] In one embodiment, the invention features a method of increasing the stability of a siNA molecule against cleavage by ribonucleases comprising introducing at least one modified nucleotide into the siNA molecule, wherein the modified nucleotide is a 2′-deoxy-2′-fluoro nucleotide. In one embodiment, all pyrimidine nucleotides present in the siNA are 2′-deoxy-2′-fluoro pyrimidine nucleotides. In one embodiment, the modified nucleotides in the siNA include at least one 2′-deoxy-2′-fluoro cytidine or 2′-deoxy-2′-fluoro uridine nucleotide. In another embodiment, the modified nucleotides in the siNA include at least one 2′-fluoro cytidine and at least one 2′-deoxy-2′-fluoro uridine nucleotides. In one embodiment, all uridine nucleotides present in the siNA are 2′-deoxy-2′-fluoro uridine nucleotides. In one embodiment, all cytidine nucleotides present in the siNA are 2′-deoxy-2′-fluoro cytidine nucleotides. In one embodiment, all adenosine nucleotides present in the siNA are 2′-deoxy-2′-fluoro adenosine nucleotides. In one embodiment, all guanosine nucleotides present in the siNA are 2′-deoxy-2′-fluoro guanosine nucleotides. The siNA can further comprise at least one modified internucleotidic linkage, such as phosphorothioate linkage. In one embodiment, the 2′-deoxy-2′-fluoronucleotides are present at specifically selected locations in the siNA that are sensitive to cleavage by ribonucleases, such as locations having pyrimidine nucleotides.

[0052] In one embodiment, the invention features a double-stranded short interfering nucleic acid (siNA) molecule that down-regulates expression of a BACE gene comprising a sense region and an antisense region, wherein the antisense region comprises a nucleotide sequence that is complementary to a nucleotide sequence of RNA encoded by the BACE gene or a portion thereof and the sense region comprises a nucleotide sequence that is complementary to the antisense region, and wherein the purine nucleotides present in the antisense region comprise 2′-deoxy-purine nucleotides. In an alternative embodiment, the purine nucleotides present in the antisense region comprise 2′-O-methyl purine nucleotides. In either of the above embodiments, the antisense region can comprise a phosphorothioate internucleotide linkage at the 3′ end of the antisense region. Alternatively, in either of the above embodiments, the antisense region can comprise a glyceryl modification at the 3′ end of the antisense region. In another embodiment of any of the above-described siNA molecules, any nucleotides present in a non-complementary region of the antisense strand (e.g. overhang region) are 2′-deoxy nucleotides.

[0053] In one embodiment, the antisense region of a siNA molecule of the invention comprises sequence complementary to a portion of a BACE transcript having sequence unique to a particular BACE disease related allele, such as sequence comprising a single nucleotide polymorphism (SNP) associated with the disease specific allele. As such, the antisense region of a siNA molecule of the invention can comprise sequence complementary to sequences that are unique to a particular allele to provide specificity in mediating selective RNAi against the disease, condition, or trait related allele.

[0054] In one embodiment, the invention features a double-stranded short interfering nucleic acid (siNA) molecule that down-regulates expression of a BACE gene, wherein the siNA molecule is assembled from two separate oligonucleotide fragments wherein one fragment comprises the sense region and the second fragment comprises the antisense region of the siNA molecule. In another embodiment about 19 nucleotides of each fragment of the siNA molecule are base-paired to the complementary nucleotides of the other fragment of the siNA molecule and wherein at least two 3′ terminal nucleotides of each fragment of the siNA molecule are not base-paired to the nucleotides of the other fragment of the siNA molecule. In one embodiment, each of the two 3′ terminal nucleotides of each fragment of the siNA molecule is a 2′-deoxy-pyrimidine nucleotide, such as a 2′-deoxy-thymidine. In another embodiment, all 21 nucleotides of each fragment of the siNA molecule are base-paired to the complementary nucleotides of the other fragment of the siNA molecule. In another embodiment, about 19 nucleotides of the antisense region are base-paired to the nucleotide sequence or a portion thereof of the RNA encoded by the BACE gene. In another embodiment, about 21 nucleotides of the antisense region are base-paired to the nucleotide sequence or a portion thereof of the RNA encoded by the BACE gene. In any of the above embodiments, the 5′-end of the fragment comprising said antisense region can optionally includes a phosphate group.

[0055] In one embodiment, the invention features a double-stranded short interfering nucleic acid (siNA) molecule that inhibits the expression of a BACE RNA sequence (e.g., wherein said target RNA sequence is encoded by a BACE gene involved in the BACE pathway), wherein the siNA molecule does not contain any ribonucleotides and wherein each strand of the double-stranded siNA molecule is about 21 nucleotides long. Examples of non-ribonucleotide containing siNA constructs are combinations of stabilization chemistries shown in Table IV in any combination of Sense/Antisense chemistries, such as Stab 7/8, Stab 7/11, Stab 8/8, Stab 18/8, Stab 18/11, Stab 12/13, Stab 7/13, Stab 18/13, Stab 7/19, Stab 8/19, Stab 18/19, Stab 7/20, Stab 8/20, or Stab 18/20.

[0056] In one embodiment, the invention features a chemically synthesized double stranded RNA molecule that directs cleavage of a BACE RNA via RNA interference, wherein each strand of said RNA molecule is about 21 to about 23 nucleotides in length; one strand of the RNA molecule comprises nucleotide sequence having sufficient complementarity to the BACE RNA for the RNA molecule to direct cleavage of the BACE RNA via RNA interference; and wherein at least one strand of the RNA molecule comprises one or more chemically modified nucleotides described herein, such as deoxynucleotides, 2′-O-methyl nucleotides, 2′-deoxy-2′-fluoro nucloetides, 2′-O-methoxyethyl nucleotides etc.

[0057] In one embodiment, the invention features a medicament comprising a siNA molecule of the invention.

[0058] In one embodiment, the invention features an active ingredient comprising a siNA molecule of the invention.

[0059] In one embodiment, the invention features the use of a double-stranded short interfering nucleic acid (siNA) molecule to down-regulate expression of a BACE gene, wherein the siNA molecule comprises one or more chemical modifications and each strand of the double-stranded siNA is about 18 to about 28 or more (e.g., about 18, 19, 20, 21, 22, 23, 24, 25, 26, 27, or 28 or more) nucleotides long.

[0060] In one embodiment, the invention features the use of a double-stranded short interfering nucleic acid (siNA) molecule that inhibits expression of a BACE gene, wherein one of the strands of the double-stranded siNA molecule is an antisense strand which comprises nucleotide sequence that is complementary to nucleotide sequence of BACE RNA or a portion thereof, the other strand is a sense strand which comprises nucleotide sequence that is complementary to a nucleotide sequence of the antisense strand and wherein a majority of the pyrimidine nucleotides present in the double-stranded siNA molecule comprises a sugar modification.

[0061] In one embodiment, the invention features a double-stranded short interfering nucleic acid (siNA) molecule that inhibits expression of a BACE gene, wherein one of the strands of the double-stranded siNA molecule is an antisense strand which comprises nucleotide sequence that is complementary to nucleotide sequence of BACE RNA or a portion thereof, wherein the other strand is a sense strand which comprises nucleotide sequence that is complementary to a nucleotide sequence of the antisense strand and wherein a majority of the pyrimidine nucleotides present in the double-stranded siNA molecule comprises a sugar modification.

[0062] In one embodiment, the invention features a double-stranded short interfering nucleic acid (siNA) molecule that inhibits expression of a BACE gene, wherein one of the strands of the double-stranded siNA molecule is an antisense strand which comprises nucleotide sequence that is complementary to nucleotide sequence of BACE RNA that encodes a protein or portion thereof, the other strand is a sense strand which comprises nucleotide sequence that is complementary to a nucleotide sequence of the antisense strand and wherein a majority of the pyrimidine nucleotides present in the double-stranded siNA molecule comprises a sugar modification. In one embodiment, each strand of the siNA molecule comprises about 18 to about 29 or more (e.g., about 18, 19, 20, 21, 22, 23, 24, 25, 26, 27, 28, or 29 or more) nucleotides, wherein each strand comprises at least about 18 nucleotides that are complementary to the nucleotides of the other strand. In one embodiment, the siNA molecule is assembled from two oligonucleotide fragments, wherein one fragment comprises the nucleotide sequence of the antisense strand of the siNA molecule and a second fragment comprises nucleotide sequence of the sense region of the siNA molecule. In one embodiment, the sense strand is connected to the antisense strand via a linker molecule, such as a polynucleotide linker or a non-nucleotide linker. In a further embodiment, the pyrimidine nucleotides present in the sense strand are 2′-deoxy-2′fluoro pyrimidine nucleotides and the purine nucleotides present in the sense region are 2′-deoxy purine nucleotides. In another embodiment, the pyrimidine nucleotides present in the sense strand are 2′-deoxy-2′fluoro pyrimidine nucleotides and the purine nucleotides present in the sense region are 2′-O-methyl purine nucleotides. In still another embodiment, the pyrimidine nucleotides present in the antisense strand are 2′-deoxy-2′-fluoro pyrimidine nucleotides and any purine nucleotides present in the antisense strand are 2′-deoxy purine nucleotides. In another embodiment, the antisense strand comprises one or more 2′-deoxy-2′-fluoro pyrimidine nucleotides and one or more 2′-O-methyl purine nucleotides. In another embodiment, the pyrimidine nucleotides present in the antisense strand are 2′-deoxy-2′-fluoro pyrimidine nucleotides and any purine nucleotides present in the antisense strand are 2′-O-methyl purine nucleotides. In a further embodiment the sense strand comprises a 3′-end and a 5′-end, wherein a terminal cap moiety (e.g., an inverted deoxy abasic moiety or inverted deoxy nucleotide moiety such as inverted thymidine) is present at the 5′-end, the 3′-end, or both of the 5′ and 3′ ends of the sense strand. In another embodiment, the antisense strand comprises a phosphorothioate internucleotide linkage at the 3′ end of the antisense strand. In another embodiment, the antisense strand comprises a glyceryl modification at the 3′ end. In another embodiment, the 5′-end of the antisense strand optionally includes a phosphate group.

[0063] In any of the above-described embodiments of a double-stranded short interfering nucleic acid (siNA) molecule that inhibits expression of a BACE gene, wherein a majority of the pyrimidine nucleotides present in the double-stranded siNA molecule comprises a sugar modification, each of the two strands of the siNA molecule can comprise about 21 nucleotides. In one embodiment, about 21 nucleotides of each strand of the siNA molecule are base-paired to the complementary nucleotides of the other strand of the siNA molecule. In another embodiment, about 19 nucleotides of each strand of the siNA molecule are base-paired to the complementary nucleotides of the other strand of the siNA molecule, wherein at least two 3′ terminal nucleotides of each strand of the siNA molecule are not base-paired to the nucleotides of the other strand of the siNA molecule. In another embodiment, each of the two 3′ terminal nucleotides of each fragment of the siNA molecule is a 2′-deoxy-pyrimidine, such as 2′-deoxy-thymidine. In one embodiment, each strand of the siNA molecule is base-paired to the complementary nucleotides of the other strand of the siNA molecule. In one embodiment, about 19 nucleotides of the antisense strand are base-paired to the nucleotide sequence of the BACE RNA or a portion thereof. In one embodiment, about 21 nucleotides of the antisense strand are base-paired to the nucleotide sequence of the BACE RNA or a portion thereof.

[0064] In one embodiment, the invention features a double-stranded short interfering nucleic acid (siNA) molecule that inhibits expression of a BACE gene, wherein one of the strands of the double-stranded siNA molecule is an antisense strand which comprises nucleotide sequence that is complementary to nucleotide sequence of BACE RNA or a portion thereof, the other strand is a sense strand which comprises nucleotide sequence that is complementary to a nucleotide sequence of the antisense strand and wherein a majority of the pyrimidine nucleotides present in the double-stranded siNA molecule comprises a sugar modification, and wherein the 5′-end of the antisense strand optionally includes a phosphate group.

[0065] In one embodiment, the invention features a double-stranded short interfering nucleic acid (siNA) molecule that inhibits expression of a BACE gene, wherein one of the strands of the double-stranded siNA molecule is an antisense strand which comprises nucleotide sequence that is complementary to nucleotide sequence of BACE RNA or a portion thereof, the other strand is a sense strand which comprises nucleotide sequence that is complementary to a nucleotide sequence of the antisense strand and wherein a majority of the pyrimidine nucleotides present in the double-stranded siNA molecule comprises a sugar modification, and wherein the nucleotide sequence or a portion thereof of the antisense strand is complementary to a nucleotide sequence of the untranslated region or a portion thereof of the BACE RNA.

[0066] In one embodiment, the invention features a double-stranded short interfering nucleic acid (siNA) molecule that inhibits expression of a BACE gene, wherein one of the strands of the double-stranded siNA molecule is an antisense strand which comprises nucleotide sequence that is complementary to nucleotide sequence of BACE RNA or a portion thereof, wherein the other strand is a sense strand which comprises nucleotide sequence that is complementary to a nucleotide sequence of the antisense strand, wherein a majority of the pyrimidine nucleotides present in the double-stranded siNA molecule comprises a sugar modification, and wherein the nucleotide sequence of the antisense strand is complementary to a nucleotide sequence of the BACE RNA or a portion thereof that is present in the BACE RNA.

[0067] In one embodiment, the invention features a composition comprising a siNA molecule of the invention in a pharmaceutically acceptable carrier or diluent.

[0068] In a non-limiting example, the introduction of chemically-modified nucleotides into nucleic acid molecules provides a powerful tool in overcoming potential limitations of in vivo stability and bioavailability inherent to native RNA molecules that are delivered exogenously. For example, the use of chemically-modified nucleic acid molecules can enable a lower dose of a particular nucleic acid molecule for a given therapeutic effect since chemically-modified nucleic acid molecules tend to have a longer half-life in serum. Furthermore, certain chemical modifications can improve the bioavailability of nucleic acid molecules by targeting particular cells or tissues and/or improving cellular uptake of the nucleic acid molecule. Therefore, even if the activity of a chemically-modified nucleic acid molecule is reduced as compared to a native nucleic acid molecule, for example, when compared to an all-RNA nucleic acid molecule, the overall activity of the modified nucleic acid molecule can be greater than that of the native molecule due to improved stability and/or delivery of the molecule. Unlike native unmodified siNA, chemically-modified siNA can also minimize the possibility of activating interferon activity in humans.

[0069] In any of the embodiments of siNA molecules described herein, the antisense region of a siNA molecule of the invention can comprise a phosphorothioate internucleotide linkage at the 3′-end of said antisense region. In any of the embodiments of siNA molecules described herein, the antisense region can comprise about one to about five phosphorothioate internucleotide linkages at the 5′-end of said antisense region. In any of the embodiments of siNA molecules described herein, the 3′-terminal nucleotide overhangs of a siNA molecule of the invention can comprise ribonucleotides or deoxyribonucleotides that are chemically-modified at a nucleic acid sugar, base, or backbone. In any of the embodiments of siNA molecules described herein, the 3′-terminal nucleotide overhangs can comprise one or more universal base ribonucleotides. In any of the embodiments of siNA molecules described herein, the 3′-terminal nucleotide overhangs can comprise one or more acyclic nucleotides.

[0070] One embodiment of the invention provides an expression vector comprising a nucleic acid sequence encoding at least one siNA molecule of the invention in a manner that allows expression of the nucleic acid molecule. Another embodiment of the invention provides a mammalian cell comprising such an expression vector. The mammalian cell can be a human cell. The siNA molecule of the expression vector can comprise a sense region and an antisense region. The antisense region can comprise sequence complementary to a RNA or DNA sequence encoding BACE and the sense region can comprise sequence complementary to the antisense region. The siNA molecule can comprise two distinct strands having complementary sense and antisense regions. The siNA molecule can comprise a single strand having complementary sense and antisense regions.

[0071] In one embodiment, the invention features a chemically-modified short interfering nucleic acid (siNA) molecule capable of mediating RNA interference (RNAi) against BACE inside a cell or reconstituted in vitro system, wherein the chemical modification comprises one or more (e.g., about 1, 2, 3, 4, 5, 6, 7, 8, 9, 10, or more) nucleotides comprising a backbone modified internucleotide linkage having Formula I:

[chemical structure]

[0072] wherein each RI and R2 is independently any nucleotide, non-nucleotide, or polynucleotide which can be naturally-occurring or chemically-modified, each X and Y is independently o, S, N, alkyl, or substituted alkyl, each Z and W is independently o, S, N, alkyl, substituted alkyl, o-alkyl, S-alkyl, alkaryl, aralkyl, or acetyl and wherein W, X, Y, and Z are optionally not all O. In another embodiment, a backbone modification of the invention comprises a phosphonoacetate and/or thiophosphonoacetate internucleotide linkage (see for example Sheehan et al., 2003, Nucleic Acids Research, 31, 4109-4118).

[0073] The chemically-modified internucleotide linkages having Formula I, for example, wherein any Z, W, X, and/or Y independently comprises a sulphur atom, can be present in one or both oligonucleotide strands of the siNA duplex, for example, in the sense strand, the antisense strand, or both strands. The siNA molecules of the invention can comprise one or more (e.g., about 1, 2, 3, 4, 5, 6, 7, 8, 9, 10, or more) chemically-modified internucleotide linkages having Formula I at the 3′-end, the 5′-end, or both of the 3′ and 5′-ends of the sense strand, the antisense strand, or both strands. For example, an exemplary siNA molecule of the invention can comprise about 1 to about 5 or more (e.g., about 1, 2, 3, 4, 5, or more) chemically-modified internucleotide linkages having Formula I at the 5′-end of the sense strand, the antisense strand, or both strands. In another non-limiting example, an exemplary siNA molecule of the invention can comprise one or more (e.g., about 1, 2, 3, 4, 5, 6, 7, 8, 9, 10, or more) pyrimidine nucleotides with chemically-modified internucleotide linkages having Formula I in the sense strand, the antisense strand, or both strands. In yet another non-limiting example, an exemplary siNA molecule of the invention can comprise one or more (e.g., about 1, 2, 3, 4, 5, 6, 7, 8, 9, 10, or more) purine nucleotides with chemically-modified internucleotide linkages having Formula I in the sense strand, the antisense strand, or both strands. In another embodiment, a siNA molecule of the invention having internucleotide linkage(s) of Formula I also comprises a chemically-modified nucleotide or non-nucleotide having any of Formulae I-VII.

[0074] In one embodiment, the invention features a chemically-modified short interfering nucleic acid (siNA) molecule capable of mediating RNA interference (RNAi) against BACE inside a cell or reconstituted in vitro system, wherein the chemical modification comprises one or more (e.g., about 1, 2, 3, 4, 5, 6, 7, 8, 9, 10, or more) nucleotides or non-nucleotides having Formula II: [chemical structure]
wherein each R3, R4, R5, R6, R7, R8, R10, R11 and R12 is independently H, OH, alkyl, substituted alkyl, alkaryl or aralkyl, F, Cl, Br, CN, CF3, OCF3, OCN, O-alkyl, S-alkyl, N-alkyl, O-alkenyl, S-alkenyl, N-alkenyl, SO-alkyl, alkyl-OSH, alkyl-OH, O-alkyl-OH, O-alkyl-SH, S-alkyl-OH, S-alkyl-SH, alkyl-S-alkyl, alkyl-O-alkyl, ONO2, NO2, N3, NH2, aminoalkyl, aminoacid, aminoacyl, ONH2, O-aminoalkyl, O-aminoacid, O-aminoacyl, heterocycloalkyl, heterocycloalkaryl, aminoalkylamino, polyalklylamino, substituted silyl, or group having Formula I or II; R9 is O, S, CH2, S═O, CHF, or CF2, and B is a nucleosidic base such as adenine, guanine, uracil, cytosine, thymine, 2-aminoadenosine, 5-methylcytosine, 2,6-diaminopurine, or any other non-naturally occurring base that can be complementary or non-complementary to target RNA or a non-nucleosidic base such as phenyl, naphthyl, 3-nitropyrrole, 5-nitroindole, nebularine, pyridone, pyridinone, or any other non-naturally occurring universal base that can be complementary or non-complementary to target RNA.

[0075] The chemically-modified nucleotide or non-nucleotide of Formula II can be present in one or both oligonucleotide strands of the siNA duplex, for example in the sense strand, the antisense strand, or both strands. The siNA molecules of the invention can comprise one or more chemically-modified nucleotide or non-nucleotide of Formula II at the 3′-end, the 5′-end, or both of the 3′ and 5′-ends of the sense strand, the antisense strand, or both strands. For example, an exemplary siNA molecule of the invention can comprise about 1 to about 5 or more (e.g., about 1, 2, 3, 4, 5, or more) chemically-modified nucleotides or non-nucleotides of Formula II at the 5′-end of the sense strand, the antisense strand, or both strands. In anther non-limiting example, an exemplary siNA molecule of the invention can comprise about 1 to about 5 or more (e.g., about 1, 2, 3, 4, 5, or more) chemically-modified nucleotides or non-nucleotides of Formula II at the 3′-end of the sense strand, the antisense strand, or both strands.

[0076] In one embodiment, the invention features a chemically-modified short interfering nucleic acid (siNA) molecule capable of mediating RNA interference (RNAi) against BACE inside a cell or reconstituted in vitro system, wherein the chemical modification comprises one or more (e.g., about 1, 2, 3, 4, 5, 6, 7, 8, 9, 10, or more) nucleotides or non-nucleotides having Formula III: [chemical structure]
wherein each R3, R4, R5, R6, R7, R8, R10, R11 and R12 is independently H, OH, alkyl, substituted alkyl, alkaryl or aralkyl, F, Cl, Br, CN, CF3, OCF3, OCN, O-alkyl, S-alkyl, N-alkyl, O-alkenyl, S-alkenyl, N-alkenyl, SO-alkyl, alkyl-OSH, alkyl-OH, O-alkyl-OH, O-alkyl-SH, S-alkyl-OH, S-alkyl-SH, alkyl-S-alkyl, alkyl-O-alkyl, ONO2, N2O, N3, NH2, aminoalkyl, aminoacid, aminoacyl, ONH2, O-aminoalkyl, O-aminoacid, O-aminoacyl, heterocycloalkyl, heterocycloalkaryl, aminoalkylamino, polyalklylamino, substituted silyl, or group having Formula I or II; R9 is O, S, CH2, S═O, CHF, or CF2, and B is a nucleosidic base such as adenine, guanine, uracil, cytosine, thymine, 2-aminoadenosine, 5-methylcytosine, 2,6-diaminopurine, or any other non-naturally occurring base that can be employed to be complementary or non-complementary to target RNA or a non-nucleosidic base such as phenyl, naphthyl, 3-nitropyrrole, 5-nitroindole, nebularine, pyridone, pyridinone, or any other non-naturally occurring universal base that can be complementary or non-complementary to target RNA.

[0077] The chemically-modified nucleotide or non-nucleotide of Formula III can be present in one or both oligonucleotide strands of the siNA duplex, for example, in the sense strand, the antisense strand, or both strands. The siNA molecules of the invention can comprise one or more chemically-modified nucleotide or non-nucleotide of Formula III at the 3′-end, the 5′-end, or both of the 3′ and 5′-ends of the sense strand, the antisense strand, or both strands. For example, an exemplary siNA molecule of the invention can comprise about 1 to about 5 or more (e.g., about 1, 2, 3, 4, 5, or more) chemically-modified nucleotide(s) or non-nucleotide(s) of Formula III at the 5′-end of the sense strand, the antisense strand, or both strands. In anther non-limiting example, an exemplary siNA molecule of the invention can comprise about 1 to about 5 or more (e.g., about 1, 2, 3, 4, 5, or more) chemically-modified nucleotide or non-nucleotide of Formula III at the 3′-end of the sense strand, the antisense strand, or both strands.

[0078] In another embodiment, a siNA molecule of the invention comprises a nucleotide having Formula II or III, wherein the nucleotide having Formula II or III is in an inverted configuration. For example, the nucleotide having Formula II or III is connected to the siNA construct in a 3′-3′, 3′-2′, 2′-3′, or 5′-5′ configuration, such as at the 3′-end, the 5′-end, or both of the 3′ and 5′-ends of one or both siNA strands.

[0079] In one embodiment, the invention features a chemically-modified short interfering nucleic acid (siNA) molecule capable of mediating RNA interference (RNAi) against BACE inside a cell or reconstituted in vitro system, wherein the chemical modification comprises a 5′-terminal phosphate group having Formula IV: [chemical structure]
wherein each X and Y is independently 0, S, N, alkyl, substituted alkyl, or alkylhalo; wherein each Z and W is independently O, S, N, alkyl, substituted alkyl, O-alkyl, S-alkyl, alkaryl, aralkyl, alkylhalo, or acetyl; and wherein W, X, Y and Z are not all O.

[0080] In one embodiment, the invention features a siNA molecule having a 5′-terminal phosphate group having Formula IV on the target-complementary strand, for example, a strand complementary to a target RNA, wherein the siNA molecule comprises an all RNA siNA molecule. In another embodiment, the invention features a siNA molecule having a 5′-terminal phosphate group having Formula IV on the target-complementary strand wherein the siNA molecule also comprises about 1 to about 3 (e.g., about 1, 2, or 3) nucleotide 3′-terminal nucleotide overhangs having about 1 to about 4 (e.g., about 1, 2, 3, or 4) deoxyribonucleotides on the 3′-end of one or both strands. In another embodiment, a 5′-terminal phosphate group having Formula IV is present on the target-complementary strand of a siNA molecule of the invention, for example a siNA molecule having chemical modifications having any of Formulae I-VII.

[0081] In one embodiment, the invention features a chemically-modified short interfering nucleic acid (siNA) molecule capable of mediating RNA interference (RNAi) against BACE inside a cell or reconstituted in vitro system, wherein the chemical modification comprises one or more phosphorothioate internucleotide linkages. For example, in a non-limiting example, the invention features a chemically-modified short interfering nucleic acid (siNA) having about 1, 2, 3, 4, 5, 6, 7, 8 or more phosphorothioate internucleotide linkages in one siNA strand. In yet another embodiment, the invention features a chemically-modified short interfering nucleic acid (siNA) individually having about 1, 2, 3, 4, 5, 6, 7, 8 or more phosphorothioate internucleotide linkages in both siNA strands. The phosphorothioate internucleotide linkages can be present in one or both oligonucleotide strands of the siNA duplex, for example in the sense strand, the antisense strand, or both strands. The siNA molecules of the invention can comprise one or more phosphorothioate internucleotide linkages at the 3′-end, the 5′-end, or both of the 3′- and 5′-ends of the sense strand, the antisense strand, or both strands. For example, an exemplary siNA molecule of the invention can comprise about 1 to about 5 or more (e.g., about 1, 2, 3, 4, 5, or more) consecutive phosphorothioate internucleotide linkages at the 5′-end of the sense strand, the antisense strand, or both strands. In another non-limiting example, an exemplary siNA molecule of the invention can comprise one or more (e.g., about 1, 2, 3, 4, 5, 6, 7, 8, 9, 10, or more) pyrimidine phosphorothioate internucleotide linkages in the sense strand, the antisense strand, or both strands. In yet another non-limiting example, an exemplary siNA molecule of the invention can comprise one or more (e.g., about 1, 2, 3, 4, 5, 6, 7, 8, 9, 10, or more) purine phosphorothioate internucleotide linkages in the sense strand, the antisense strand, or both strands.

[0082] In one embodiment, the invention features a siNA molecule, wherein the sense strand comprises one or more, for example, about 1, 2, 3, 4, 5, 6, 7, 8, 9, 10, or more phosphorothioate internucleotide linkages, and/or one or more (e.g., about 1, 2, 3, 4, 5, 6, 7, 8, 9, 10 or more) 2′-deoxy, 2′-O-methyl, 2′-deoxy-2′-fluoro, and/or about one or more (e.g., about 1, 2, 3, 4, 5, 6, 7, 8, 9, 10 or more) universal base modified nucleotides, and optionally a terminal cap molecule at the 3′-end, the 5′-end, or both of the 3′- and 5′-ends of the sense strand; and wherein the antisense strand comprises about 1 to about 10 or more, specifically about 1, 2, 3, 4, 5, 6, 7, 8, 9, 10, or more phosphorothioate internucleotide linkages, and/or one or more (e.g., about 1, 2, 3, 4, 5, 6, 7, 8, 9, 10 or more) 2′-deoxy, 2′-O-methyl, 2′-deoxy-2′-fluoro, and/or one or more (e.g., about 1, 2, 3, 4, 5, 6, 7, 8, 9, 10 or more) universal base modified nucleotides, and optionally a terminal cap molecule at the 3′-end, the 5′-end, or both of the 3′- and 5′-ends of the antisense strand. In another embodiment, one or more, for example about 1, 2, 3, 4, 5, 6, 7, 8, 9, 10, or more, pyrimidine nucleotides of the sense and/or antisense siNA strand are chemically-modified with 2′-deoxy, 2′-O-methyl and/or 2′-deoxy-2′-fluoro nucleotides, with or without one or more, for example about 1, 2, 3, 4, 5, 6, 7, 8, 9, 10, or more, phosphorothioate internucleotide linkages and/or a terminal cap molecule at the 3′-end, the 5′-end, or both of the 3′- and 5′-ends, being present in the same or different strand.

[0083] In another embodiment, the invention features a siNA molecule, wherein the sense strand comprises about 1 to about 5, specifically about 1, 2, 3, 4, or 5 phosphorothioate internucleotide linkages, and/or one or more (e.g., about 1, 2, 3, 4, 5, or more) 2′-deoxy, 2′-O-methyl, 2′-deoxy-2′-fluoro, and/or one or more (e.g., about 1, 2, 3, 4, 5, or more) universal base modified nucleotides, and optionally a terminal cap molecule at the 3-end, the 5′-end, or both of the 3′- and 5′-ends of the sense strand; and wherein the antisense strand comprises about 1 to about 5 or more, specifically about 1, 2, 3, 4, 5, or more phosphorothioate internucleotide linkages, and/or one or more (e.g., about 1, 2, 3, 4, 5, 6, 7, 8, 9, 10 or more) 2′-deoxy, 2′-O-methyl, 2′-deoxy-2′-fluoro, and/or one or more (e.g., about 1, 2, 3, 4, 5, 6, 7, 8, 9, 10 or more) universal base modified nucleotides, and optionally a terminal cap molecule at the 3′-end, the 5′-end, or both of the 3′- and 5′-ends of the antisense strand. In another embodiment, one or more, for example about 1, 2, 3, 4, 5, 6, 7, 8, 9, 10, or more, pyrimidine nucleotides of the sense and/or antisense siNA strand are chemically-modified with 2′-deoxy, 2′-O-methyl and/or 2′-deoxy-2′-fluoro nucleotides, with or without about 1 to about 5 or more, for example about 1, 2, 3, 4, 5, or more phosphorothioate internucleotide linkages and/or a terminal cap molecule at the 3′-end, the 5′-end, or both of the 3′- and 5′-ends, being present in the same or different strand.

[0084] In one embodiment, the invention features a siNA molecule, wherein the antisense strand comprises one or more, for example, about 1, 2, 3, 4, 5, 6, 7, 8, 9, 10, or more phosphorothioate internucleotide linkages, and/or about one or more (e.g., about 1, 2, 3, 4, 5, 6, 7, 8, 9, 10 or more) 2′-deoxy, 2′-O-methyl, 2′-deoxy-2′-fluoro, and/or one or more (e.g., about 1, 2, 3, 4, 5, 6, 7, 8, 9, 10 or more) universal base modified nucleotides, and optionally a terminal cap molecule at the 3′-end, the 5′-end, or both of the 3′- and 5′-ends of the sense strand; and wherein the antisense strand comprises about 1 to about 10 or more, specifically about 1, 2, 3, 4, 5, 6, 7, 8, 9, 10 or more phosphorothioate internucleotide linkages, and/or one or more (e.g., about 1, 2, 3, 4, 5, 6, 7, 8, 9, 10 or more) 2′-deoxy, 2′-O-methyl, 2′-deoxy-2′-fluoro, and/or one or more (e.g., about 1, 2, 3, 4, 5, 6, 7, 8, 9, 10 or more) universal base modified nucleotides, and optionally a terminal cap molecule at the 3′-end, the 5′-end, or both of the 3′- and 5′-ends of the antisense strand. In another embodiment, one or more, for example about 1, 2, 3, 4, 5, 6, 7, 8, 9, 10 or more pyrimidine nucleotides of the sense and/or antisense siNA strand are chemically-modified with 2′-deoxy, 2′-O-methyl and/or 2′-deoxy-2′-fluoro nucleotides, with or without one or more, for example, about 1, 2, 3, 4, 5, 6, 7, 8, 9, 10 or more phosphorothioate internucleotide linkages and/or a terminal cap molecule at the 3′-end, the 5′-end, or both of the 3′ and 5′-ends, being present in the same or different strand.

[0085] In another embodiment, the invention features a siNA molecule, wherein the antisense strand comprises about 1 to about 5 or more, specifically about 1, 2, 3, 4, 5 or more phosphorothioate internucleotide linkages, and/or one or more (e.g., about 1, 2, 3, 4, 5, 6, 7, 8, 9, 10 or more) 2′-deoxy, 2′-O-methyl, 2′-deoxy-2′-fluoro, and/or one or more (e.g., about 1, 2, 3, 4, 5, 6, 7, 8, 9, 10 or more) universal base modified nucleotides, and optionally a terminal cap molecule at the 3′-end, the 5′-end, or both of the 3′- and 5′-ends of the sense strand; and wherein the antisense strand comprises about 1 to about 5 or more, specifically about 1, 2, 3, 4, 5 or more phosphorothioate internucleotide linkages, and/or one or more (e.g., about 1, 2, 3, 4, 5, 6, 7, 8, 9, 10 or more) 2′-deoxy, 2′-O-methyl, 2′-deoxy-2′-fluoro, and/or one or more (e.g., about 1, 2, 3, 4, 5, 6, 7, 8, 9, 10 or more) universal base modified nucleotides, and optionally a terminal cap molecule at the 3′-end, the 5′-end, or both of the 3′- and 5′-ends of the antisense strand. In another embodiment, one or more, for example about 1, 2, 3, 4, 5, 6, 7, 8, 9, 10 or more pyrimidine nucleotides of the sense and/or antisense siNA strand are chemically-modified with 2′-deoxy, 2′-O-methyl and/or 2′-deoxy-2′-fluoro nucleotides, with or without about 1 to about 5, for example about 1, 2, 3, 4, 5 or more phosphorothioate internucleotide linkages and/or a terminal cap molecule at the 3′-end, the 5′-end, or both of the 3′- and 5′-ends, being present in the same or different strand.

[0086] In one embodiment, the invention features a chemically-modified short interfering nucleic acid (siNA) molecule having about 1 to about 5 or more (specifically about 1, 2, 3, 4, 5 or more) phosphorothioate internucleotide linkages in each strand of the siNA molecule.

[0087] In another embodiment, the invention features a siNA molecule comprising 2′-5′ internucleotide linkages. The 2′-5′ internucleotide linkage(s) can be at the 3′-end, the 5′-end, or both of the 3′- and 5′-ends of one or both siNA sequence strands. In addition, the 2′-5′ internucleotide linkage(s) can be present at various other positions within one or both siNA sequence strands, for example, about 1, 2, 3, 4, 5, 6, 7, 8, 9, 10, or more including every internucleotide linkage of a pyrimidine nucleotide in one or both strands of the siNA molecule can comprise a 2′-5′ internucleotide linkage, or about 1, 2, 3, 4, 5, 6, 7, 8, 9, 10, or more including every internucleotide linkage of a purine nucleotide in one or both strands of the siNA molecule can comprise a 2′-5′ internucleotide linkage.

[0088] In another embodiment, a chemically-modified siNA molecule of the invention comprises a duplex having two strands, one or both of which can be chemically-modified, wherein each strand is about 18 to about 27 (e.g., about 18, 19, 20, 21, 22, 23, 24, 25, 26, or 27) nucleotides in length, wherein the duplex has about 18 to about 23 (e.g., about 18, 19, 20, 21, 22, or 23) base pairs, and wherein the chemical modification comprises a structure having any of Formulae I-VII. For example, an exemplary chemically-modified siNA molecule of the invention comprises a duplex having two strands, one or both of which can be chemically-modified with a chemical modification having any of Formulae I-VII or any combination thereof, wherein each strand consists of about 21 nucleotides, each having a 2-nucleotide 3′-terminal nucleotide overhang, and wherein the duplex has about 19 base pairs. In another embodiment, a siNA molecule of the invention comprises a single stranded hairpin structure, wherein the siNA is about 36 to about 70 (e.g., about 36, 40, 45, 50, 55, 60, 65, or 70) nucleotides in length having about 18 to about 23 (e.g., about 18, 19, 20, 21, 22, or 23) base pairs, and wherein the siNA can include a chemical modification comprising a structure having any of Formulae I-VII or any combination thereof. For example, an exemplary chemically-modified siNA molecule of the invention comprises a linear oligonucleotide having about 42 to about 50 (e.g., about 42, 43, 44, 45, 46, 47, 48, 49, or 50) nucleotides that is chemically-modified with a chemical modification having any of Formulae I-VII or any combination thereof, wherein the linear oligonucleotide forms a hairpin structure having about 19 base pairs and a 2-nucleotide 3′-terminal nucleotide overhang. In another embodiment, a linear hairpin siNA molecule of the invention contains a stem loop motif, wherein the loop portion of the siNA molecule is biodegradable. For example, a linear hairpin siNA molecule of the invention is designed such that degradation of the loop portion of the siNA molecule in vivo can generate a double-stranded siNA molecule with 3′-terminal overhangs, such as 3′-terminal nucleotide overhangs comprising about 2 nucleotides.

[0089] In another embodiment, a siNA molecule of the invention comprises a hairpin structure, wherein the siNA is about 25 to about 50 (e.g., about 25, 26, 27, 28, 29, 30, 31, 32, 33, 34, 35, 36, 37, 38, 39, 40, 41, 42, 43, 44, 45, 46, 47, 48, 49, or 50) nucleotides in length having about 3 to about 25 (e.g., about 3, 4, 5, 6, 7, 8, 9, 10, 11, 12, 13, 14, 15, 16, 17, 18, 19, 20, 21, 22, 23, 24, or 25) base pairs, and wherein the siNA can include one or more chemical modifications comprising a structure having any of Formulae I-VII or any combination thereof. For example, an exemplary chemically-modified siNA molecule of the invention comprises a linear oligonucleotide having about 25 to about 35 (e.g., about 25, 26, 27, 28, 29, 30, 31, 32, 33, 34, or 35) nucleotides that is chemically-modified with one or more chemical modifications having any of Formulae I-VII or any combination thereof, wherein the linear oligonucleotide forms a hairpin structure having about 3 to about 23 (e.g.,about 3, 4, 5, 6, 7, 8, 9, 10, 11, 12, 13, 14, 15, 16, 17, 18, 19, 20, 21, 22, or 23) base pairs and a 5′-terminal phosphate group that can be chemically modified as described herein (for example a 5′-terminal phosphate group having Formula IV). In another embodiment, a linear hairpin siNA molecule of the invention contains a stem loop motif, wherein the loop portion of the siNA molecule is biodegradable. In one embodiment, a linear hairpin siNA molecule of the invention comprises a loop portion comprising a non-nucleotide linker.

[0090] In another embodiment, a siNA molecule of the invention comprises an asymmetric hairpin structure, wherein the siNA is about 25 to about 50 (e.g., about 25, 26, 27, 28, 29, 30, 31, 32, 33, 34, 35, 36, 37, 38, 39, 40, 41, 42, 43, 44, 45, 46, 47, 48, 49, or 50) nucleotides in length having about 3 to about 20 (e.g., about 3, 4, 5, 6, 7, 8, 9, 10, 11, 12, 13, 14, 15, 16, 17, 18, 19, or 20) base pairs, and wherein the siNA can include one or more chemical modifications comprising a structure having any of Formulae I-VII or any combination thereof. For example, an exemplary chemically-modified siNA molecule of the invention comprises a linear oligonucleotide having about 25 to about 35 (e.g., about 25, 26, 27, 28, 29, 30, 31, 32, 33, 34, or 35) nucleotides that is chemically-modified with one or more chemical modifications having any of Formulae I-VII or any combination thereof, wherein the linear oligonucleotide forms an asymmetric hairpin structure having about 3 to about 18 (e.g., about 3, 4, 5, 6, 7, 8, 9, 10, 11, 12, 13, 14, 15, 16, 17, or 18) base pairs and a 5′-terminal phosphate group that can be chemically modified as described herein (for example a 5′-terminal phosphate group having Formula IV). In one embodiment, an asymmetric hairpin siNA molecule of the invention contains a stem loop motif, wherein the loop portion of the siNA molecule is biodegradable. In another embodiment, an asymmetric hairpin siNA molecule of the invention comprises a loop portion comprising a non-nucleotide linker.

[0091] In another embodiment, a siNA molecule of the invention comprises an asymmetric double stranded structure having separate polynucleotide strands comprising sense and antisense regions, wherein the antisense region is about 16 to about 25 (e.g., about 16, 17, 18, 19, 20, 21, 22, 23, 24, or 25) nucleotides in length, wherein the sense region is about 3 to about 18 (e.g., about 3, 4, 5, 6, 7, 8, 9, 10, 11, 12, 13, 14, 15, 16, 17, or 18) nucleotides in length, wherein the sense region and the antisense region have at least 3 complementary nucleotides, and wherein the siNA can include one or more chemical modifications comprising a structure having any of Formulae I-VII or any combination thereof. For example, an exemplary chemically-modified siNA molecule of the invention comprises an asymmetric double stranded structure having separate polynucleotide strands comprising sense and antisense regions, wherein the antisense region is about 18 to about 22 (e.g., about 18, 19, 20, 21, or 22) nucleotides in length and wherein the sense region is about 3 to about 15 (e.g., about 3, 4, 5, 6, 7, 8, 9, 10, 11, 12, 13, 14, or 15) nucleotides in length, wherein the sense region the antisense region have at least 3 complementary nucleotides, and wherein the siNA can include one or more chemical modifications comprising a structure having any of Formulae I-VII or any combination thereof. In another embodiment, the asymmetric double stranded siNA molecule can also have a 5′-terminal phosphate group that can be chemically modified as described herein (for example a 5′-terminal phosphate group having Formula IV).

[0092] In another embodiment, a siNA molecule of the invention comprises a circular nucleic acid molecule, wherein the siNA is about 38 to about 70 (e.g., about 38, 40, 45, 50, 55, 60, 65, or 70) nucleotides in length having about 18 to about 23 (e.g., about 18, 19, 20, 21, 22,or 23) base pairs, and wherein the siNA can include a chemical modification, which comprises a structure having any of Formulae I-VII or any combination thereof. For example, an exemplary chemically-modified siNA molecule of the invention comprises a circular oligonucleotide having about 42 to about 50 (e.g., about 42, 43, 44, 45, 46, 47, 48, 49, or 50) nucleotides that is chemically-modified with a chemical modification having any of Formulae I-VII or any combination thereof, wherein the circular oligonucleotide forms a dumbbell shaped structure having about 19 base pairs and 2 loops.

[0093] In another embodiment, a circular siNA molecule of the invention contains two loop motifs, wherein one or both loop portions of the siNA molecule is biodegradable. For example, a circular siNA molecule of the invention is designed such that degradation of the loop portions of the siNA molecule in vivo can generate a double-stranded siNA molecule with 3′-terminal overhangs, such as 3′-terminal nucleotide overhangs comprising about 2 nucleotides.

[0094] In one embodiment, a siNA molecule of the invention comprises at least one (e.g., about 1, 2, 3, 4, 5, 6, 7, 8, 9, 10, or more) abasic moiety, for example a compound having Formula V: [chemical structure]
wherein each R3, R4, R5, R6, R7, R8, R10, R11, R12, and R13 is independently H, OH, alkyl, substituted alkyl, alkaryl or aralkyl, F, Cl, Br, CN, CF3, OCF3, OCN, O-alkyl, S-alkyl, N-alkyl, O-alkenyl, S-alkenyl, N-alkenyl, SO-alkyl, alkyl-OSH, alkyl-OH, O-alkyl-OH, O-alkyl-SH, S-alkyl-OH, S-alkyl-SH, alkyl-S-alkyl, alkyl-O-alkyl, ONO2, NO2, N3, NH2, aminoalkyl, aminoacid, aminoacyl, ONH2, O-aminoalkyl, O-aminoacid, O-aminoacyl, heterocycloalkyl, heterocycloalkaryl, aminoalkylamino, polyalklylamino, substituted silyl, or group having Formula I or II; R9 is O, S, CH2, S═O, CHF, or CF2.

[0095] In one embodiment, a siNA molecule of the invention comprises at least one (e.g., about 1, 2, 3, 4, 5, 6, 7, 8, 9, 10, or more) inverted abasic moiety, for example a compound having Formula VI: [chemical structure]
wherein each R3, R4, R5, R6, R7, R8, R10, R11, R12, and R13 is independently H, OH, alkyl, substituted alkyl, alkaryl or aralkyl, F, Cl, Br, CN, CF3, OCF3, OCN, O-alkyl, S-alkyl, N-alkyl, O-alkenyl, S-alkenyl, N-alkenyl, SO-alkyl, alkyl-OSH, alkyl-OH, O-alkyl-OH, O-alkyl-SH, S-alkyl-OH, S-alkyl-SH, alkyl-S-alkyl, alkyl-O-alkyl, ONO2, NO2, N3, NH2, aminoalkyl, aminoacid, aminoacyl, ONH2, O-aminoalkyl, O-aminoacid, O-aminoacyl, heterocycloalkyl, heterocycloalkaryl, aminoalkylamino, polyalklylamino, substituted silyl, or group having Formula I or II; R9 is O, S, CH2, S═O, CHF, or CF2, and either R2, R3, R8 or R13 serve as points of attachment to the siNA molecule of the invention.

[0096] In another embodiment, a siNA molecule of the invention comprises at least one (e.g., about 1, 2, 3, 4, 5, 6, 7, 8, 9, 10, or more) substituted polyalkyl moieties, for example a compound having Formula VII: [chemical structure]
wherein each n is independently an integer from 1 to 12, each R1, R2 and R3 is independently H, OH, alkyl, substituted alkyl, alkaryl or aralkyl, F, Cl, Br, CN, CF3, OCF3, OCN, O-alkyl, S-alkyl, N-alkyl, O-alkenyl, S-alkenyl, N-alkenyl, SO-alkyl, alkyl-OSH, alkyl-OH, O-alkyl-OH, O-alkyl-SH, S-alkyl-OH, S-alkyl-SH, alkyl-S-alkyl, alkyl-O-alkyl, ONO2, NO2, N3, NH2, aminoalkyl, aminoacid, aminoacyl, ONH2, O-aminoalkyl, O-aminoacid, O-aminoacyl, heterocycloalkyl, heterocycloalkaryl, aminoalkylamino, polyalklylamino, substituted silyl, or a group having Formula I, and R1, R2 or R3 serves as points of attachment to the siNA molecule of the invention.

[0097] In another embodiment, the invention features a compound having Formula VII, wherein R1 and R2 are hydroxyl (OH) groups, n=1, and R3 comprises O and is the point of attachment to the 3′-end, the 5′-end, or both of the 3′ and 5′-ends of one or both strands of a double-stranded siNA molecule of the invention or to a single-stranded siNA molecule of the invention. This modification is referred to herein as “glyceryl” (for example modification 6 in FIG. 10).

[0098] In another embodiment, a chemically modified nucleoside or non-nucleoside (e.g. a moiety having any of Formula V, VI or VII) of the invention is at the 3′-end, the 5′-end, or both of the 3′ and 5′-ends of a siNA molecule of the invention. For example, chemically modified nucleoside or non-nucleoside (e.g., a moiety having Formula V, VI or VII) can be present at the 3′-end, the 5′-end, or both of the 3′ and 5′-ends of the antisense strand, the sense strand, or both antisense and sense strands of the siNA molecule. In one embodiment, the chemically modified nucleoside or non-nucleoside (e.g., a moiety having Formula V, VI or VII) is present at the 5′-end and 3′-end of the sense strand and the 3′-end of the antisense strand of a double stranded siNA molecule of the invention. In one embodiment, the chemically modified nucleoside or non-nucleoside (e.g., a moiety having Formula V, VI or VII) is present at the terminal position of the 5′-end and 3′-end of the sense strand and the 3′-end of the antisense strand of a double stranded siNA molecule of the invention. In one embodiment, the chemically modified nucleoside or non-nucleoside (e.g., a moiety having Formula V, VI or VII) is present at the two terminal positions of the 5′-end and 3′-end of the sense strand and the 3′-end of the antisense strand of a double stranded siNA molecule of the invention. In one embodiment, the chemically modified nucleoside or non-nucleoside (e.g., a moiety having Formula V, VI or VII) is present at the penultimate position of the 5′-end and 3′-end of the sense strand and the 3′-end of the antisense strand of a double stranded siNA molecule of the invention. In addition, a moiety having Formula VII can be present at the 3′-end or the 5′-end of a hairpin siNA molecule as described herein.

[0099] In another embodiment, a siNA molecule of the invention comprises an abasic residue having Formula V or VI, wherein the abasic residue having Formula VI or VI is connected to the siNA construct in a 3′-3′, 3′-2′, 2′-3′, or 5′-5′ configuration, such as at the 3′-end, the 5′-end, or both of the 3′ and 5′-ends of one or both siNA strands.

[0100] In one embodiment, a siNA molecule of the invention comprises one or more (e.g., about 1, 2, 3, 4, 5, 6, 7, 8, 9, 10, or more) locked nucleic acid (LNA) nucleotides, for example, at the 5′-end, the 3′-end, both of the 5′ and 3′-ends, or any combination thereof, of the siNA molecule.

[0101] In another embodiment, a siNA molecule of the invention comprises one or more (e.g., about 1, 2, 3, 4, 5, 6, 7, 8, 9, 10, or more) acyclic nucleotides, for example, at the 5′-end, the 3′-end, both of the 5′ and 3′-ends, or any combination thereof, of the siNA molecule.

[0102] In one embodiment, the invention features a chemically-modified short interfering nucleic acid (siNA) molecule of the invention comprising a sense region, wherein any (e.g., one or more or all) pyrimidine nucleotides present in the sense region are 2′-deoxy-2′-fluoro pyrimidine nucleotides (e.g., wherein all pyrimidine nucleotides are 2′-deoxy-2′-fluoro pyrimidine nucleotides or alternately a plurality of pyrimidine nucleotides are 2′-deoxy-2′-fluoro pyrimidine nucleotides), and wherein any (e.g., one or more or all) purine nucleotides present in the sense region are 2′-deoxy purine nucleotides (e.g., wherein all purine nucleotides are 2′-deoxy purine nucleotides or alternately a plurality of purine nucleotides are 2′-deoxy purine nucleotides).

[0103] In one embodiment, the invention features a chemically-modified short interfering nucleic acid (siNA) molecule of the invention comprising a sense region, wherein any (e.g., one or more or all) pyrimidine nucleotides present in the sense region are 2′-deoxy-2′-fluoro pyrimidine nucleotides (e.g., wherein all pyrimidine nucleotides are 2′-deoxy-2′-fluoro pyrimidine nucleotides or alternately a plurality of pyrimidine nucleotides are 2′-deoxy-2′-fluoro pyrimidine nucleotides), and wherein any (e.g., one or more or all) purine nucleotides present in the sense region are 2′-deoxy purine nucleotides (e.g., wherein all purine nucleotides are 2′-deoxy purine nucleotides or alternately a plurality of purine nucleotides are 2′-deoxy purine nucleotides), wherein any nucleotides comprising a 3′-terminal nucleotide overhang that are present in said sense region are 2′-deoxy nucleotides.

[0104] In one embodiment, the invention features a chemically-modified short interfering nucleic acid (siNA) molecule of the invention comprising a sense region, wherein any (e.g., one or more or all) pyrimidine nucleotides present in the sense region are 2′-deoxy-2′-fluoro pyrimidine nucleotides (e.g., wherein all pyrimidine nucleotides are 2′-deoxy-2′-fluoro pyrimidine nucleotides or alternately a plurality of pyrimidine nucleotides are 2′-deoxy-2′-fluoro pyrimidine nucleotides), and wherein any (e.g., one or more or all) purine nucleotides present in the sense region are 2′-O-methyl purine nucleotides (e.g., wherein all purine nucleotides are 2′-O-methyl purine nucleotides or alternately a plurality of purine nucleotides are 2′-O-methyl purine nucleotides).

[0105] In one embodiment, the invention features a chemically-modified short interfering nucleic acid (siNA) molecule of the invention comprising a sense region, wherein any (e.g., one or more or all) pyrimidine nucleotides present in the sense region are 2′-deoxy-2′-fluoro pyrimidine nucleotides (e.g., wherein all pyrimidine nucleotides are 2′-deoxy-2′-fluoro pyrimidine nucleotides or alternately a plurality of pyrimidine nucleotides are 2′-deoxy-2′-fluoro pyrimidine nucleotides), wherein any (e.g., one or more or all) purine nucleotides present in the sense region are 2′-O-methyl purine nucleotides (e.g., wherein all purine nucleotides are 2′-O-methyl purine nucleotides or alternately a plurality of purine nucleotides are 2′-O-methyl purine nucleotides), and wherein any nucleotides comprising a 3′-terminal nucleotide overhang that are present in said sense region are 2′-deoxy nucleotides.

[0106] In one embodiment, the invention features a chemically-modified short interfering nucleic acid (siNA) molecule of the invention comprising an antisense region, wherein any (e.g., one or more or all) pyrimidine nucleotides present in the antisense region are 2′-deoxy-2′-fluoro pyrimidine nucleotides (e.g., wherein all pyrimidine nucleotides are 2′-deoxy-2′-fluoro pyrimidine nucleotides or alternately a plurality of pyrimidine nucleotides are 2′-deoxy-2′-fluoro pyrimidine nucleotides), and wherein any (e.g., one or more or all) purine nucleotides present in the antisense region are 2′-O-methyl purine nucleotides (e.g., wherein all purine nucleotides are 2′-O-methyl purine nucleotides or alternately a plurality of purine nucleotides are 2′-O-methyl purine nucleotides).

[0107] In one embodiment, the invention features a chemically-modified short interfering nucleic acid (siNA) molecule of the invention comprising an antisense region, wherein any (e.g., one or more or all) pyrimidine nucleotides present in the antisense region are 2′-deoxy-2′-fluoro pyrimidine nucleotides (e.g., wherein all pyrimidine nucleotides are 2′-deoxy-2′-fluoro pyrimidine nucleotides or alternately a plurality of pyrimidine nucleotides are 2′-deoxy-2′-fluoro pyrimidine nucleotides), wherein any (e.g., one or more or all) purine nucleotides present in the antisense region are 2′-O-methyl purine nucleotides (e.g., wherein all purine nucleotides are 2′-O-methyl purine nucleotides or alternately a plurality of purine nucleotides are 2′-O-methyl purine nucleotides), and wherein any nucleotides comprising a 3′-terminal nucleotide overhang that are present in said antisense region are 2′-deoxy nucleotides.

[0108] In one embodiment, the invention features a chemically-modified short interfering nucleic acid (siNA) molecule of the invention comprising an antisense region, wherein any (e.g., one or more or all) pyrimidine nucleotides present in the antisense region are 2′-deoxy-2′-fluoro pyrimidine nucleotides (e.g., wherein all pyrimidine nucleotides are 2′-deoxy-2′-fluoro pyrimidine nucleotides or alternately a plurality of pyrimidine nucleotides are 2′-deoxy-2′-fluoro pyrimidine nucleotides), and wherein any (e.g., one or more or all) purine nucleotides present in the antisense region are 2′-deoxy purine nucleotides (e.g., wherein all purine nucleotides are 2′-deoxy purine nucleotides or alternately a plurality of purine nucleotides are 2′-deoxy purine nucleotides).

[0109] In one embodiment, the invention features a chemically-modified short interfering nucleic acid (siNA) molecule of the invention comprising an antisense region, wherein any (e.g., one or more or all) pyrimidine nucleotides present in the antisense region are 2′-deoxy-2′-fluoro pyrimidine nucleotides (e.g., wherein all pyrimidine nucleotides are 2′-deoxy-2′-fluoro pyrimidine nucleotides or alternately a plurality of pyrimidine nucleotides are 2′-deoxy-2′-fluoro pyrimidine nucleotides), and wherein any (e.g., one or more or all) purine nucleotides present in the antisense region are 2′-O-methyl purine nucleotides (e.g., wherein all purine nucleotides are 2′-O-methyl purine nucleotides or alternately a plurality of purine nucleotides are 2′-O-methyl purine nucleotides).

[0110] In one embodiment, the invention features a chemically-modified short interfering nucleic acid (siNA) molecule of the invention capable of mediating RNA interference (RNAi) against BACE inside a cell or reconstituted in vitro system comprising a sense region, wherein one or more pyrimidine nucleotides present in the sense region are 2′-deoxy-2′-fluoro pyrimidine nucleotides (e.g., wherein all pyrimidine nucleotides are 2′-deoxy-2′-fluoro pyrimidine nucleotides or alternately a plurality of pyrimidine nucleotides are 2′-deoxy-2′-fluoro pyrimidine nucleotides), and one or more purine nucleotides present in the sense region are 2′-deoxy purine nucleotides (e.g., wherein all purine nucleotides are 2′-deoxy purine nucleotides or alternately a plurality of purine nucleotides are 2′-deoxy purine nucleotides), and an antisense region, wherein one or more pyrimidine nucleotides present in the antisense region are 2′-deoxy-2′-fluoro pyrimidine nucleotides (e.g., wherein all pyrimidine nucleotides are 2′-deoxy-2′-fluoro pyrimidine nucleotides or alternately a plurality of pyrimidine nucleotides are 2′-deoxy-2′-fluoro pyrimidine nucleotides), and one or more purine nucleotides present in the antisense region are 2′-O-methyl purine nucleotides (e.g., wherein all purine nucleotides are 2′-O-methyl purine nucleotides or alternately a plurality of purine nucleotides are 2′-O-methyl purine nucleotides). The sense region and/or the antisense region can have a terminal cap modification, such as any modification described herein or shown in FIG. 10, that is optionally present at the 3′-end, the 5′-end, or both of the 3′ and 5′-ends of the sense and/or antisense sequence. The sense and/or antisense region can optionally further comprise a 3′-terminal nucleotide overhang having about 1 to about 4 (e.g., about 1, 2, 3, or 4) 2′-deoxynucleotides. The overhang nucleotides can further comprise one or more (e.g., about 1, 2, 3, 4 or more) phosphorothioate, phosphonoacetate, and/or thiophosphonoacetate internucleotide linkages. Non-limiting examples of these chemically-modified siNAs are shown in FIGS. 4 and 5 and Tables III and IV herein. In any of these described embodiments, the purine nucleotides present in the sense region are alternatively 2′-O-methyl purine nucleotides (e.g., wherein all purine nucleotides are 2′-O-methyl purine nucleotides or alternately a plurality of purine nucleotides are 2′-O-methyl purine nucleotides) and one or more purine nucleotides present in the antisense region are 2′-O-methyl purine nucleotides (e.g., wherein all purine nucleotides are 2′-O-methyl purine nucleotides or alternately a plurality of purine nucleotides are 2′-O-methyl purine nucleotides). Also, in any of these embodiments, one or more purine nucleotides present in the sense region are alternatively purine ribonucleotides (e.g., wherein all purine nucleotides are purine ribonucleotides or alternately a plurality of purine nucleotides are purine ribonucleotides) and any purine nucleotides present in the antisense region are 2′-O-methyl purine nucleotides (e.g., wherein all purine nucleotides are 2′-O-methyl purine nucleotides or alternately a plurality of purine nucleotides are 2′-O-methyl purine nucleotides). Additionally, in any of these embodiments, one or more purine nucleotides present in the sense region and/or present in the antisense region are alternatively selected from the group consisting of 2′-deoxy nucleotides, locked nucleic acid (LNA) nucleotides, 2′-methoxyethyl nucleotides, 4′-thionucleotides, and 2′-O-methyl nucleotides (e.g., wherein all purine nucleotides are selected from the group consisting of 2′-deoxy nucleotides, locked nucleic acid (LNA) nucleotides, 2′-methoxyethyl nucleotides, 4′-thionucleotides, and 2′-O-methyl nucleotides or alternately a plurality of purine nucleotides are selected from the group consisting of 2′-deoxy nucleotides, locked nucleic acid (LNA) nucleotides, 2′-methoxyethyl nucleotides, 4′-thionucleotides, and 2′-O-methyl nucleotides).

[0111] In another embodiment, any modified nucleotides present in the siNA molecules of the invention, preferably in the antisense strand of the siNA molecules of the invention, but also optionally in the sense and/or both antisense and sense strands, comprise modified nucleotides having properties or characteristics similar to naturally occurring ribonucleotides. For example, the invention features siNA molecules including modified nucleotides having a Northern conformation (e.g., Northern pseudorotation cycle, see for example Saenger, Principles of Nucleic Acid Structure, Springer-Verlag ed., 1984). As such, chemically modified nucleotides present in the siNA molecules of the invention, preferably in the antisense strand of the siNA molecules of the invention, but also optionally in the sense and/or both antisense and sense strands, are resistant to nuclease degradation while at the same time maintaining the capacity to mediate RNAi. Non-limiting examples of nucleotides having a northern configuration include locked nucleic acid (LNA) nucleotides (e.g., 2′-O, 4′-C-methylene-(D-ribofuranosyl) nucleotides); 2′-methoxyethoxy (MOE) nucleotides; 2′-methyl-thio-ethyl, 2′-deoxy-2′-fluoro nucleotides, 2′-deoxy-2′-chloro nucleotides, 2′-azido nucleotides, and 2′-O-methyl nucleotides.

[0112] In one embodiment, the sense strand of a double stranded siNA molecule of the invention comprises a terminal cap moiety, (see for example FIG. 10) such as an inverted deoxyabaisc moiety, at the 3′-end, 5′-end, or both 3′ and 5′-ends of the sense strand.

[0113] In one embodiment, the invention features a chemically-modified short interfering nucleic acid molecule (siNA) capable of mediating RNA interference (RNAi) against BACE inside a cell or reconstituted in vitro system, wherein the chemical modification comprises a conjugate covalently attached to the chemically-modified siNA molecule. Non-limiting examples of conjugates contemplated by the invention include conjugates and ligands described in Vargeese et al., U.S. Ser. No. 10/427,160, filed Apr. 30, 2003, incorporated by reference herein in its entirety, including the drawings. In another embodiment, the conjugate is covalently attached to the chemically-modified siNA molecule via a biodegradable linker. In one embodiment, the conjugate molecule is attached at the 3′-end of either the sense strand, the antisense strand, or both strands of the chemically-modified siNA molecule. In another embodiment, the conjugate molecule is attached at the 5′-end of either the sense strand, the antisense strand, or both strands of the chemically-modified siNA molecule. In yet another embodiment, the conjugate molecule is attached both the 3′-end and 5′-end of either the sense strand, the antisense strand, or both strands of the chemically-modified siNA molecule, or any combination thereof. In one embodiment, a conjugate molecule of the invention comprises a molecule that facilitates delivery of a chemically-modified siNA molecule into a biological system, such as a cell. In another embodiment, the conjugate molecule attached to the chemically-modified siNA molecule is a polyethylene glycol, human serum albumin, or a ligand for a cellular receptor that can mediate cellular uptake. Examples of specific conjugate molecules contemplated by the instant invention that can be attached to chemically-modified siNA molecules are described in Vargeese et al., U.S. Ser, No. 10/201,394, filed Jul. 22, 2002 incorporated by reference herein. The type of conjugates used and the extent of conjugation of siNA molecules of the invention can be evaluated for improved pharmacokinetic profiles, bioavailability, and/or stability of siNA constructs while at the same time maintaining the ability of the siNA to mediate RNAi activity. As such, one skilled in the art can screen siNA constructs that are modified with various conjugates to determine whether the siNA conjugate complex possesses improved properties while maintaining the ability to mediate RNAi, for example in animal models as are generally known in the art.

[0114] In one embodiment, the invention features a short interfering nucleic acid (siNA) molecule of the invention, wherein the siNA further comprises a nucleotide, non-nucleotide, or mixed nucleotide/non-nucleotide linker that joins the sense region of the siNA to the antisense region of the siNA. In one embodiment, a nucleotide linker of the invention can be a linker of ≧2 nucleotides in length, for example about 3, 4, 5, 6, 7, 8, 9, or 10 nucleotides in length. In another embodiment, the nucleotide linker can be a nucleic acid aptamer. By “aptamer” or “nucleic acid aptamer” as used herein is meant a nucleic acid molecule that binds specifically to a target molecule wherein the nucleic acid molecule has sequence that comprises a sequence recognized by the target molecule in its natural setting. Alternately, an aptamer can be a nucleic acid molecule that binds to a target molecule where the target molecule does not naturally bind to a nucleic acid. The target molecule can be any molecule of interest. For example, the aptamer can be used to bind to a ligand-binding domain of a protein, thereby preventing interaction of the naturally occurring ligand with the protein. This is a non-limiting example and those in the art will recognize that other embodiments can be readily generated using techniques generally known in the art. (See, for example, Gold et al., 1995, Annu. Rev. Biochem., 64, 763; Brody and Gold, 2000, J. Biotechnol., 74, 5; Sun, 2000, Curr. Opin. Mol. Ther., 2, 100; Kusser, 2000, J. Biotechnol., 74, 27; Hermann and Patel, 2000, Science, 287, 820; and Jayasena, 1999, Clinical Chemistry, 45, 1628.)

[0115] In yet another embodiment, a non-nucleotide linker of the invention comprises abasic nucleotide, polyether, polyamine, polyamide, peptide, carbohydrate, lipid, polyhydrocarbon, or other polymeric compounds (e.g. polyethylene glycols such as those having between 2 and 100 ethylene glycol units). Specific examples include those described by Seela and Kaiser, Nucleic Acids Res. 1990, 18:6353 and Nucleic Acids Res. 1987, 15:3113; Cload and Schepartz, J. Am. Chem. Soc. 1991, 113:6324; Richardson and Schepartz, J. Am. Chem. Soc. 1991, 113:5109; Ma et al, Nucleic Acids Res. 1993, 21:2585 and Biochemistry 1993, 32:1751; Durand et al., Nucleic Acids Res. 1990, 18:6353; McCurdy et al., Nucleosides & Nucleotides 1991, 10:287; Jschke et al., Tetrahedron Lett. 1993, 34:301; Ono et al., Biochemistry 1991, 30:9914; Arnold et al., International Publication No. WO 89/02439; Usman et al., International Publication No. WO 95/06731; Dudycz et al., International Publication No. WO 95/11910 and Ferentz and Verdine, J. Am. Chem. Soc. 1991, 113:4000, all hereby incorporated by reference herein. A “non-nucleotide” further means any group or compound that can be incorporated into a nucleic acid chain in the place of one or more nucleotide units, including either sugar and/or phosphate substitutions, and allows the remaining bases to exhibit their enzymatic activity. The group or compound can be abasic in that it does not contain a commonly recognized nucleotide base, such as adenosine, guanine, cytosine, uracil or thymine, for example at the C1 position of the sugar.

[0116] In one embodiment, the invention features a short interfering nucleic acid (siNA) molecule capable of mediating RNA interference (RNAi) inside a cell or reconstituted in vitro system, wherein one or both strands of the siNA molecule that are assembled from two separate oligonucleotides do not comprise any ribonucleotides. For example, a siNA molecule can be assembled from a single oligonculeotide where the sense and antisense regions of the siNA comprise separate oligonucleotides that do not have any ribonucleotides (e.g., nucleotides having a 2′-OH group) present in the oligonucleotides. In another example, a siNA molecule can be assembled from a single oligonculeotide where the sense and antisense regions of the siNA are linked or circularized by a nucleotide or non-nucleotide linker as described herein, wherein the oligonucleotide does not have any ribonucleotides (e.g., nucleotides having a 2′-OH group) present in the oligonucleotide. Applicant has surprisingly found that the presense of ribonucleotides (e.g., nucleotides having a 2′-hydroxyl group) within the siNA molecule is not required or essential to support RNAi activity. As such, in one embodiment, all positions within the siNA can include chemically modified nucleotides and/or non-nucleotides such as nucleotides and or non-nucleotides having Formula I, II, III, IV, V, VI, or VII or any combination thereof to the extent that the ability of the siNA molecule to support RNAi activity in a cell is maintained.

[0117] In one embodiment, a siNA molecule of the invention is a single stranded siNA molecule that mediates RNAi activity in a cell or reconstituted in vitro system comprising a single stranded polynucleotide having complementarity to a target nucleic acid sequence. In another embodiment, the single stranded siNA molecule of the invention comprises a 5′-terminal phosphate group. In another embodiment, the single stranded siNA molecule of the invention comprises a 5′-terminal phosphate group and a 3′-terminal phosphate group (e.g., a 2′,3′-cyclic phosphate). In another embodiment, the single stranded siNA molecule of the invention comprises about 18 to about 29 (e.g., about 18, 19, 20, 21, 22, 23, 24, 25, 26, 27, 28, or 29) nucleotides. In yet another embodiment, the single stranded siNA molecule of the invention comprises one or more chemically modified nucleotides or non-nucleotides described herein. For example, all the positions within the siNA molecule can include chemically-modified nucleotides such as nucleotides having any of Formulae I-VII, or any combination thereof to the extent that the ability of the siNA molecule to support RNAi activity in a cell is maintained.

[0118] In one embodiment, a siNA molecule of the invention is a single stranded siNA molecule that mediates RNAi activity in a cell or reconstituted in vitro system comprising a single stranded polynucleotide having complementarity to a target nucleic acid sequence, wherein one or more pyrimidine nucleotides present in the siNA are 2′-deoxy-2′-fluoro pyrimidine nucleotides (e.g., wherein all pyrimidine nucleotides are 2′-deoxy-2′-fluoro pyrimidine nucleotides or alternately a plurality of pyrimidine nucleotides are 2′-deoxy-2′-fluoro pyrimidine nucleotides), and wherein any purine nucleotides present in the antisense region are 2′-O-methyl purine nucleotides (e.g., wherein all purine nucleotides are 2′-O-methyl purine nucleotides or alternately a plurality of purine nucleotides are 2′-O-methyl purine nucleotides), and a terminal cap modification, such as any modification described herein or shown in FIG. 10, that is optionally present at the 3′-end, the 5′-end, or both of the 3′ and 5′-ends of the antisense sequence. The siNA optionally further comprises about 1 to about 4 or more (e.g., about 1, 2, 3, 4 or more) terminal 2′-deoxynucleotides at the 3′-end of the siNA molecule, wherein the terminal nucleotides can further comprise one or more (e.g., 1, 2, 3, 4 or more) phosphorothioate, phosphonoacetate, and/or thiophosphonoacetate internucleotide linkages, and wherein the siNA optionally further comprises a terminal phosphate group, such as a 5′-terminal phosphate group. In any of these embodiments, any purine nucleotides present in the antisense region are alternatively 2′-deoxy purine nucleotides (e.g., wherein all purine nucleotides are 2′-deoxy purine nucleotides or alternately a plurality of purine nucleotides are 2′-deoxy purine nucleotides). Also, in any of these embodiments, any purine nucleotides present in the siNA (i.e., purine nucleotides present in the sense and/or antisense region) can alternatively be locked nucleic acid (LNA) nucleotides (e.g., wherein all purine nucleotides are LNA nucleotides or alternately a plurality of purine nucleotides are LNA nucleotides). Also, in any of these embodiments, any purine nucleotides present in the siNA are alternatively 2′-methoxyethyl purine nucleotides (e.g., wherein all purine nucleotides are 2′-methoxyethyl purine nucleotides or alternately a plurality of purine nucleotides are 2′-methoxyethyl purine nucleotides). In another embodiment, any modified nucleotides present in the single stranded siNA molecules of the invention comprise modified nucleotides having properties or characteristics similar to naturally occurring ribonucleotides. For example, the invention features siNA molecules including modified nucleotides having a Northern conformation (e.g., Northern pseudorotation cycle, see for example Saenger, Principles of Nucleic Acid Structure, Springer-Verlag ed., 1984). As such, chemically modified nucleotides present in the single stranded siNA molecules of the invention are preferably resistant to nuclease degradation while at the same time maintaining the capacity to mediate RNAi.

[0119] In one embodiment, the invention features a method for modulating the expression of a BACE gene within a cell comprising: (a) synthesizing a siNA molecule of the invention, which can be chemically-modified, wherein one of the siNA strands comprises a sequence complementary to RNA of the BACE gene; and (b) introducing the siNA molecule into a cell under conditions suitable to modulate the expression of the BACE gene in the cell.

[0120] In one embodiment, the invention features a method for modulating the expression of a BACE gene within a cell comprising: (a) synthesizing a siNA molecule of the invention, which can be chemically-modified, wherein one of the siNA strands comprises a sequence complementary to RNA of the BACE gene and wherein the sense strand sequence of the siNA comprises a sequence identical or substantially similar to the sequence of the target RNA; and (b) introducing the siNA molecule into a cell under conditions suitable to modulate the expression of the BACE gene in the cell.

[0121] In another embodiment, the invention features a method for modulating the expression of more than one BACE gene within a cell comprising: (a) synthesizing siNA molecules of the invention, which can be chemically-modified, wherein one of the siNA strands comprises a sequence complementary to RNA of the BACE genes; and (b) introducing the siNA molecules into a cell under conditions suitable to modulate the expression of the BACE genes in the cell.

[0122] In another embodiment, the invention features a method for modulating the expression of two or more BACE genes within a cell comprising: (a) synthesizing one or more siNA molecules of the invention, which can be chemically-modified, wherein the siNA strands comprise sequences complementary to RNA of the BACE genes and wherein the sense strand sequences of the siNAs comprise sequences identical or substantially similar to the sequences of the target RNAs; and (b) introducing the siNA molecules into a cell under conditions suitable to modulate the expression of the BACE genes in the cell.

[0123] In another embodiment, the invention features a method for modulating the expression of more than one BACE gene within a cell comprising: (a) synthesizing a siNA molecule of the invention, which can be chemically-modified, wherein one of the siNA strands comprises a sequence complementary to RNA of the BACE gene and wherein the sense strand sequence of the siNA comprises a sequence identical or substantially similar to the sequences of the target RNAs; and (b) introducing the siNA molecule into a cell under conditions suitable to modulate the expression of the BACE genes in the cell.

[0124] In one embodiment, siNA molecules of the invention are used as reagents in ex vivo applications. For example, siNA reagents are introduced into tissue or cells that are transplanted into a subject for therapeutic effect. The cells and/or tissue can be derived from an organism or subject that later receives the explant, or can be derived from another organism or subject prior to transplantation. The siNA molecules can be used to modulate the expression of one or more genes in the cells or tissue, such that the cells or tissue obtain a desired phenotype or are able to perform a function when transplanted in vivo. In one embodiment, certain target cells from a patient are extracted. These extracted cells are contacted with siNAs targeting a specific nucleotide sequence within the cells under conditions suitable for uptake of the siNAs by these cells (e.g. using delivery reagents such as cationic lipids, liposomes and the like or using techniques such as electroporation to facilitate the delivery of siNAs into cells). The cells are then reintroduced back into the same patient or other patients. In one embodiment, the invention features a method of modulating the expression of a BACE gene in a tissue explant comprising: (a) synthesizing a siNA molecule of the invention, which can be chemically-modified, wherein one of the siNA strands comprises a sequence complementary to RNA of the BACE gene; and (b) introducing the siNA molecule into a cell of the tissue explant derived from a particular organism under conditions suitable to modulate the expression of the BACE gene in the tissue explant. In another embodiment, the method further comprises introducing the tissue explant back into the organism the tissue was derived from or into another organism under conditions suitable to modulate the expression of the BACE gene in that organism.

[0125] In one embodiment, the invention features a method of modulating the expression of a BACE gene in a tissue explant comprising: (a) synthesizing a siNA molecule of the invention, which can be chemically-modified, wherein one of the siNA strands comprises a sequence complementary to RNA of the BACE gene and wherein the sense strand sequence of the siNA comprises a sequence identical or substantially similar to the sequence of the target RNA; and (b) introducing the siNA molecule into a cell of the tissue explant derived from a particular organism under conditions suitable to modulate the expression of the BACE gene in the tissue explant. In another embodiment, the method further comprises introducing the tissue explant back into the organism the tissue was derived from or into another organism under conditions suitable to modulate the expression of the BACE gene in that organism.

[0126] In another embodiment, the invention features a method of modulating the expression of more than one BACE gene in a tissue explant comprising: (a) synthesizing siNA molecules of the invention, which can be chemically-modified, wherein one of the siNA strands comprises a sequence complementary to RNA of the BACE genes; and (b) introducing the siNA molecules into a cell of the tissue explant derived from a particular organism under conditions suitable to modulate the expression of the BACE genes in the tissue explant. In another embodiment, the method further comprises introducing the tissue explant back into the organism the tissue was derived from or into another organism under conditions suitable to modulate the expression of the BACE genes in that organism.

[0127] In one embodiment, the invention features a method of modulating the expression of a BACE gene in a subject or organism comprising: (a) synthesizing a siNA molecule of the invention, which can be chemically-modified, wherein one of the siNA strands comprises a sequence complementary to RNA of the BACE gene; and (b) introducing the siNA molecule into the subject or organism under conditions suitable to modulate the expression of the BACE gene in the subject or organism. The level of BACE protein or RNA can be determined using various methods well-known in the art.

[0128] In another embodiment, the invention features a method of modulating the expression of more than one BACE gene in a subject or organism comprising: (a) synthesizing siNA molecules of the invention, which can be chemically-modified, wherein one of the siNA strands comprises a sequence complementary to RNA of the BACE genes; and (b) introducing the siNA molecules into the subject or organism under conditions suitable to modulate the expression of the BACE genes in the subject or organism. The level of BACE protein or RNA can be determined as is known in the art.

[0129] In one embodiment, the invention features a method for modulating the expression of a BACE gene within a cell comprising: (a) synthesizing a siNA molecule of the invention, which can be chemically-modified, wherein the siNA comprises a single stranded sequence having complementarity to RNA of the BACE gene; and (b) introducing the siNA molecule into a cell under conditions suitable to modulate the expression of the BACE gene in the cell.

[0130] In another embodiment, the invention features a method for modulating the expression of more than one BACE gene within a cell comprising: (a) synthesizing siNA molecules of the invention, which can be chemically-modified, wherein the siNA comprises a single stranded sequence having complementarity to RNA of the BACE gene; and (b) contacting the cell in vitro or in vivo with the siNA molecule under conditions suitable to modulate the expression of the BACE genes in the cell.

[0131] In one embodiment, the invention features a method of modulating the expression of a BACE gene in a tissue explant comprising: (a) synthesizing a siNA molecule of the invention, which can be chemically-modified, wherein the siNA comprises a single stranded sequence having complementarity to RNA of the BACE gene; and (b) contacting a cell of the tissue explant derived from a particular subject or organism with the siNA molecule under conditions suitable to modulate the expression of the BACE gene in the tissue explant. In another embodiment, the method further comprises introducing the tissue explant back into the subject or organism the tissue was derived from or into another subject or organism under conditions suitable to modulate the expression of the BACE gene in that subject or organism.

[0132] In another embodiment, the invention features a method of modulating the expression of more than one BACE gene in a tissue explant comprising: (a) synthesizing siNA molecules of the invention, which can be chemically-modified, wherein the siNA comprises a single stranded sequence having complementarity to RNA of the BACE gene; and (b) introducing the siNA molecules into a cell of the tissue explant derived from a particular subject or organism under conditions suitable to modulate the expression of the BACE genes in the tissue explant. In another embodiment, the method further comprises introducing the tissue explant back into the subject or organism the tissue was derived from or into another subject or organism under conditions suitable to modulate the expression of the BACE genes in that subject or organism.

[0133] In one embodiment, the invention features a method of modulating the expression of a BACE gene in a subject or organism comprising: (a) synthesizing a siNA molecule of the invention, which can be chemically-modified, wherein the siNA comprises a single stranded sequence having complementarity to RNA of the BACE gene; and (b) introducing the siNA molecule into the subject or organism under conditions suitable to modulate the expression of the BACE gene in the subject or organism.

[0134] In another embodiment, the invention features a method of modulating the expression of more than one BACE gene in a subject or organism comprising: (a) synthesizing siNA molecules of the invention, which can be chemically-modified, wherein the siNA comprises a single stranded sequence having complementarity to RNA of the BACE gene; and (b) introducing the siNA molecules into the subject or organism under conditions suitable to modulate the expression of the BACE genes in the subject or organism.

[0135] In one embodiment, the invention features a method of modulating the expression of a BACE gene in a subject or organism comprising contacting the subject or organism with a siNA molecule of the invention under conditions suitable to modulate the expression of the BACE gene in the subject or organism.

[0136] In one embodiment, the invention features a method for treating Alzheimer's disease in a subject or organism comprising contacting the subject or organism with a siNA molecule of the invention under conditions suitable to modulate the expression of the BACE gene in the subject or organism.

[0137] In one embodiment, the invention features a method for treating neurodegenerative disorders or conditions, such as dementia, in a subject or organism comprising contacting the subject or organism with a siNA molecule of the invention under conditions suitable to modulate the expression of the BACE gene in the subject or organism.

[0138] In one embodiment, the invention features a method for treating stroke/cardiovascular accident in a subject or organism comprising contacting the subject or organism with a siNA molecule of the invention under conditions suitable to modulate the expression of the BACE gene in the subject or organism.

[0139] In another embodiment, the invention features a method of modulating the expression of more than one BACE gene in a subject or organism comprising contacting the subject or organism with one or more siNA molecules of the invention under conditions suitable to modulate the expression of the BACE genes in the subject or organism.

[0140] The siNA molecules of the invention can be designed to down regulate or inhibit target (e.g., BACE) gene expression through RNAi targeting of a variety of RNA molecules. In one embodiment, the siNA molecules of the invention are used to target various RNAs corresponding to a target gene. Non-limiting examples of such RNAs include messenger RNA (mRNA), alternate RNA splice variants of target gene(s), post-transcriptionally modified RNA of target gene(s), pre-mRNA of target gene(s), and/or RNA templates. If alternate splicing produces a family of transcripts that are distinguished by usage of appropriate exons, the instant invention can be used to inhibit gene expression through the appropriate exons to specifically inhibit or to distinguish among the functions of gene family members. For example, a protein that contains an alternatively spliced transmembrane domain can be expressed in both membrane bound and secreted forms. Use of the invention to target the exon containing the transmembrane domain can be used to determine the functional consequences of pharmaceutical targeting of membrane bound as opposed to the secreted form of the protein. Non-limiting examples of applications of the invention relating to targeting these RNA molecules include therapeutic pharmaceutical applications, pharmaceutical discovery applications, molecular diagnostic and gene function applications, and gene mapping, for example using single nucleotide polymorphism mapping with siNA molecules of the invention. Such applications can be implemented using known gene sequences or from partial sequences available from an expressed sequence tag (EST).

[0141] In another embodiment, the siNA molecules of the invention are used to target conserved sequences corresponding to a gene family or gene families such as BACE family genes. As such, siNA molecules targeting multiple BACE targets can provide increased therapeutic effect. In addition, siNA can be used to characterize pathways of gene function in a variety of applications. For example, the present invention can be used to inhibit the activity of target gene(s) in a pathway to determine the function of uncharacterized gene(s) in gene function analysis, mRNA function analysis, or translational analysis. The invention can be used to determine potential target gene pathways involved in various diseases and conditions toward pharmaceutical development. The invention can be used to understand pathways of gene expression involved in, for example, Alzheimer's disease and other neurodegenerative disorders or conditions, such as dementia, and stroke/cardiovascular accident.

[0142] In one embodiment, siNA molecule(s) and/or methods of the invention are used to down regulate the expression of gene(s) that encode RNA referred to by Genbank Accession, for example, BACE genes encoding RNA sequence(s) referred to herein by Genbank Accession number, for example, Genbank Accession Nos. shown in Table I.

[0143] In one embodiment, the invention features a method comprising: (a) generating a library of siNA constructs having a predetermined complexity; and (b) assaying the siNA constructs of (a) above, under conditions suitable to determine RNAi target sites within the target RNA sequence. In one embodiment, the siNA molecules of (a) have strands of a fixed length, for example, about 23 nucleotides in length. In another embodiment, the siNA molecules of (a) are of differing length, for example having strands of about 18 to about 25 (e.g., about 18, 19, 20, 21, 22, 23, 24, or 25) nucleotides in length. In one embodiment, the assay can comprise a reconstituted in vitro siNA assay as described herein. In another embodiment, the assay can comprise a cell culture system in which target RNA is expressed. In another embodiment, fragments of target RNA are analyzed for detectable levels of cleavage, for example by gel electrophoresis, northern blot analysis, or RNAse protection assays, to determine the most suitable target site(s) within the target RNA sequence. The target RNA sequence can be obtained as is known in the art, for example, by cloning and/or transcription for in vitro systems, and by cellular expression in in vivo systems.

[0144] In one embodiment, the invention features a method comprising: (a) generating a randomized library of siNA constructs having a predetermined complexity, such as of 4^{N}, where N represents the number of base paired nucleotides in each of the siNA construct strands (eg. for a siNA construct having 21 nucleotide sense and antisense strands with 19 base pairs, the complexity would be 4¹⁹); and (b) assaying the siNA constructs of (a) above, under conditions suitable to determine RNAi target sites within the target BACE RNA sequence. In another embodiment, the siNA molecules of (a) have strands of a fixed length, for example about 23 nucleotides in length. In yet another embodiment, the siNA molecules of (a) are of differing length, for example having strands of about 18 to about 25 (e.g., about 18, 19, 20, 21, 22, 23, 24, or 25) nucleotides in length. In one embodiment, the assay can comprise a reconstituted in vitro siNA assay as described in Example 7 herein. In another embodiment, the assay can comprise a cell culture system in which target RNA is expressed. In another embodiment, fragments of BACE RNA are analyzed for detectable levels of cleavage, for example, by gel electrophoresis, northern blot analysis, or RNAse protection assays, to determine the most suitable target site(s) within the target BACE RNA sequence. The target BACE RNA sequence can be obtained as is known in the art, for example, by cloning and/or transcription for in vitro systems, and by cellular expression in in vivo systems.

[0145] In another embodiment, the invention features a method comprising: (a) analyzing the sequence of a RNA target encoded by a target gene; (b) synthesizing one or more sets of siNA molecules having sequence complementary to one or more regions of the RNA of (a); and (c) assaying the siNA molecules of (b) under conditions suitable to determine RNAi targets within the target RNA sequence. In one embodiment, the siNA molecules of (b) have strands of a fixed length, for example about 23 nucleotides in length. In another embodiment, the siNA molecules of (b) are of differing length, for example having strands of about 18 to about 25 (e.g., about 18, 19, 20, 21, 22, 23, 24, or 25) nucleotides in length. In one embodiment, the assay can comprise a reconstituted in vitro siNA assay as described herein. In another embodiment, the assay can comprise a cell culture system in which target RNA is expressed. Fragments of target RNA are analyzed for detectable levels of cleavage, for example by gel electrophoresis, northern blot analysis, or RNAse protection assays, to determine the most suitable target site(s) within the target RNA sequence. The target RNA sequence can be obtained as is known in the art, for example, by cloning and/or transcription for in vitro systems, and by expression in in vivo systems.

[0146] By “target site” is meant a sequence within a target RNA that is “targeted” for cleavage mediated by a siNA construct which contains sequences within its antisense region that are complementary to the target sequence.

[0147] By “detectable level of cleavage” is meant cleavage of target RNA (and formation of cleaved product RNAs) to an extent sufficient to discern cleavage products above the background of RNAs produced by random degradation of the target RNA. Production of cleavage products from 1-5% of the target RNA is sufficient to detect above the background for most methods of detection.

[0148] In one embodiment, the invention features a composition comprising a siNA molecule of the invention, which can be chemically-modified, in a pharmaceutically acceptable carrier or diluent. In another embodiment, the invention features a pharmaceutical composition comprising siNA molecules of the invention, which can be chemically-modified, targeting one or more genes in a pharmaceutically acceptable carrier or diluent. In another embodiment, the invention features a method for diagnosing a disease or condition in a subject comprising administering to the subject a composition of the invention under conditions suitable for the diagnosis of the disease or condition in the subject. In another embodiment, the invention features a method for treating or preventing a disease or condition in a subject, comprising administering to the subject a composition of the invention under conditions suitable for the treatment or prevention of the disease or condition in the subject, alone or in conjunction with one or more other therapeutic compounds. In yet another embodiment, the invention features a method for treating Alzheimer's disease and/or other neurodegenerative disorders, such as dementia and stroke/cardiovascular accident in a subject comprising administering to the subject a composition of the invention under conditions suitable for the treatment of Alzheimer's disease and/or other neurodegenerative disorders, such as dementia and stroke/cardiovascular accident in the subject.

[0149] In another embodiment, the invention features a method for validating a BACE gene target, comprising: (a) synthesizing a siNA molecule of the invention, which can be chemically-modified, wherein one of the siNA strands includes a sequence complementary to RNA of a BACE target gene; (b) introducing the siNA molecule into a cell, tissue, subject or organism under conditions suitable for modulating expression of the BACE target gene in the cell, tissue, subject, or organism; and (c) determining the function of the gene by assaying for any phenotypic change in the cell, tissue, subject, or organism.

[0150] In another embodiment, the invention features a method for validating a BACE target comprising: (a) synthesizing a siNA molecule of the invention, which can be chemically-modified, wherein one of the siNA strands includes a sequence complementary to RNA of a BACE target gene; (b) introducing the siNA molecule into a biological system under conditions suitable for modulating expression of the BACE target gene in the biological system; and (c) determining the function of the gene by assaying for any phenotypic change in the biological system.

[0151] By “biological system” is meant, material, in a purified or unpurified form, from biological sources, including but not limited to human or animal, wherein the system comprises the components required for RNAi activity. The term “biological system” includes, for example, a cell, tissue, subject, or organism, or extract thereof. The term biological system also includes reconstituted RNAi systems that can be used in an in vitro setting.

[0152] By “phenotypic change” is meant any detectable change to a cell that occurs in response to contact or treatment with a nucleic acid molecule of the invention (e.g., siNA). Such detectable changes include, but are not limited to, changes in shape, size, proliferation, motility, protein expression or RNA expression or other physical or chemical changes as can be assayed by methods known in the art. The detectable change can also include expression of reporter genes/molecules such as Green Florescent Protein (GFP) or various tags that are used to identify an expressed protein or any other cellular component that can be assayed.

[0153] In one embodiment, the invention features a kit containing a siNA molecule of the invention, which can be chemically-modified, that can be used to modulate the expression of a BACE target gene in a biological system, including, for example, in a cell, tissue, subject, or organism. In another embodiment, the invention features a kit containing more than one siNA molecule of the invention, which can be chemically-modified, that can be used to modulate the expression of more than one BACE target gene in a biological system, including, for example, in a cell, tissue, subject, or organism.

[0154] In one embodiment, the invention features a cell containing one or more siNA molecules of the invention, which can be chemically-modified. In another embodiment, the cell containing a siNA molecule of the invention is a mammalian cell. In yet another embodiment, the cell containing a siNA molecule of the invention is a human cell.

[0155] In one embodiment, the synthesis of a siNA molecule of the invention, which can be chemically-modified, comprises: (a) synthesis of two complementary strands of the siNA molecule; (b) annealing the two complementary strands together under conditions suitable to obtain a double-stranded siNA molecule. In another embodiment, synthesis of the two complementary strands of the siNA molecule is by solid phase oligonucleotide synthesis. In yet another embodiment, synthesis of the two complementary strands of the siNA molecule is by solid phase tandem oligonucleotide synthesis.

[0156] In one embodiment, the invention features a method for synthesizing a siNA duplex molecule comprising: (a) synthesizing a first oligonucleotide sequence strand of the siNA molecule, wherein the first oligonucleotide sequence strand comprises a cleavable linker molecule that can be used as a scaffold for the synthesis of the second oligonucleotide sequence strand of the siNA; (b) synthesizing the second oligonucleotide sequence strand of siNA on the scaffold of the first oligonucleotide sequence strand, wherein the second oligonucleotide sequence strand further comprises a chemical moiety than can be used to purify the siNA duplex; (c) cleaving the linker molecule of (a) under conditions suitable for the two siNA oligonucleotide strands to hybridize and form a stable duplex; and (d) purifying the siNA duplex utilizing the chemical moiety of the second oligonucleotide sequence strand. In one embodiment, cleavage of the linker molecule in (c) above takes place during deprotection of the oligonucleotide, for example, under hydrolysis conditions using an alkylamine base such as methylamine. In one embodiment, the method of synthesis comprises solid phase synthesis on a solid support such as controlled pore glass (CPG) or polystyrene, wherein the first sequence of (a) is synthesized on a cleavable linker, such as a succinyl linker, using the solid support as a scaffold. The cleavable linker in (a) used as a scaffold for synthesizing the second strand can comprise similar reactivity as the solid support derivatized linker, such that cleavage of the solid support derivatized linker and the cleavable linker of (a) takes place concomitantly. In another embodiment, the chemical moiety of (b) that can be used to isolate the attached oligonucleotide sequence comprises a trityl group, for example a dimethoxytrityl group, which can be employed in a trityl-on synthesis strategy as described herein. In yet another embodiment, the chemical moiety, such as a dimethoxytrityl group, is removed during purification, for example, using acidic conditions.

[0157] In a further embodiment, the method for siNA synthesis is a solution phase synthesis or hybrid phase synthesis wherein both strands of the siNA duplex are synthesized in tandem using a cleavable linker attached to the first sequence which acts a scaffold for synthesis of the second sequence. Cleavage of the linker under conditions suitable for hybridization of the separate siNA sequence strands results in formation of the double-stranded siNA molecule.

[0158] In another embodiment, the invention features a method for synthesizing a siNA duplex molecule comprising: (a) synthesizing one oligonucleotide sequence strand of the siNA molecule, wherein the sequence comprises a cleavable linker molecule that can be used as a scaffold for the synthesis of another oligonucleotide sequence; (b) synthesizing a second oligonucleotide sequence having complementarity to the first sequence strand on the scaffold of (a), wherein the second sequence comprises the other strand of the double-stranded siNA molecule and wherein the second sequence further comprises a chemical moiety than can be used to isolate the attached oligonucleotide sequence; (c) purifying the product of (b) utilizing the chemical moiety of the second oligonucleotide sequence strand under conditions suitable for isolating the full-length sequence comprising both siNA oligonucleotide strands connected by the cleavable linker and under conditions suitable for the two siNA oligonucleotide strands to hybridize and form a stable duplex. In one embodiment, cleavage of the linker molecule in (c) above takes place during deprotection of the oligonucleotide, for example, under hydrolysis conditions. In another embodiment, cleavage of the linker molecule in (c) above takes place after deprotection of the oligonucleotide. In another embodiment, the method of synthesis comprises solid phase synthesis on a solid support such as controlled pore glass (CPG) or polystyrene, wherein the first sequence of (a) is synthesized on a cleavable linker, such as a succinyl linker, using the solid support as a scaffold. The cleavable linker in (a) used as a scaffold for synthesizing the second strand can comprise similar reactivity or differing reactivity as the solid support derivatized linker, such that cleavage of the solid support derivatized linker and the cleavable linker of (a) takes place either concomitantly or sequentially. In one embodiment, the chemical moiety of (b) that can be used to isolate the attached oligonucleotide sequence comprises a trityl group, for example a dimethoxytrityl group.

[0159] In another embodiment, the invention features a method for making a double-stranded siNA molecule in a single synthetic process comprising: (a) synthesizing an oligonucleotide having a first and a second sequence, wherein the first sequence is complementary to the second sequence, and the first oligonucleotide sequence is linked to the second sequence via a cleavable linker, and wherein a terminal 5′-protecting group, for example, a 5′-O-dimethoxytrityl group (5′-O-DMT) remains on the oligonucleotide having the second sequence; (b) deprotecting the oligonucleotide whereby the deprotection results in the cleavage of the linker joining the two oligonucleotide sequences; and (c) purifying the product of (b) under conditions suitable for isolating the double-stranded siNA molecule, for example using a trityl-on synthesis strategy as described herein.

[0160] In another embodiment, the method of synthesis of siNA molecules of the invention comprises the teachings of Scaringe et al., U.S. Pat. Nos. 5,889,136; 6,008,400; and 6,111,086, incorporated by reference herein in their entirety.

[0161] In one embodiment, the invention features siNA constructs that mediate RNAi against BACE, wherein the siNA construct comprises one or more chemical modifications, for example, one or more chemical modifications having any of Formulae I-VII or any combination thereof that increases the nuclease resistance of the siNA construct.

[0162] In another embodiment, the invention features a method for generating siNA molecules with increased nuclease resistance comprising (a) introducing nucleotides having any of Formula I-VII or any combination thereof into a siNA molecule, and (b) assaying the siNA molecule of step (a) under conditions suitable for isolating siNA molecules having increased nuclease resistance.

[0163] In one embodiment, the invention features siNA constructs that mediate RNAi against BACE, wherein the siNA construct comprises one or more chemical modifications described herein that modulates the binding affinity between the sense and antisense strands of the siNA construct.

[0164] In another embodiment, the invention features a method for generating siNA molecules with increased binding affinity between the sense and antisense strands of the siNA molecule comprising (a) introducing nucleotides having any of Formula I-VII or any combination thereof into a siNA molecule, and (b) assaying the siNA molecule of step (a) under conditions suitable for isolating siNA molecules having increased binding affinity between the sense and antisense strands of the siNA molecule.

[0165] In one embodiment, the invention features siNA constructs that mediate RNAi against BACE, wherein the siNA construct comprises one or more chemical modifications described herein that modulates the binding affinity between the antisense strand of the siNA construct and a complementary target RNA sequence within a cell.

[0166] In one embodiment, the invention features siNA constructs that mediate RNAi against BACE, wherein the siNA construct comprises one or more chemical modifications described herein that modulates the binding affinity between the antisense strand of the siNA construct and a complementary target DNA sequence within a cell.

[0167] In another embodiment, the invention features a method for generating siNA molecules with increased binding affinity between the antisense strand of the siNA molecule and a complementary target RNA sequence comprising (a) introducing nucleotides having any of Formula I-VII or any combination thereof into a siNA molecule, and (b) assaying the siNA molecule of step (a) under conditions suitable for isolating siNA molecules having increased binding affinity between the antisense strand of the siNA molecule and a complementary target RNA sequence.

[0168] In another embodiment, the invention features a method for generating siNA molecules with increased binding affinity between the antisense strand of the siNA molecule and a complementary target DNA sequence comprising (a) introducing nucleotides having any of Formula I-VII or any combination thereof into a siNA molecule, and (b) assaying the siNA molecule of step (a) under conditions suitable for isolating siNA molecules having increased binding affinity between the antisense strand of the siNA molecule and a complementary target DNA sequence.

[0169] In one embodiment, the invention features siNA constructs that mediate RNAi against BACE, wherein the siNA construct comprises one or more chemical modifications described herein that modulate the polymerase activity of a cellular polymerase capable of generating additional endogenous siNA molecules having sequence homology to the chemically-modified siNA construct.

[0170] In another embodiment, the invention features a method for generating siNA molecules capable of mediating increased polymerase activity of a cellular polymerase capable of generating additional endogenous siNA molecules having sequence homology to a chemically-modified siNA molecule comprising (a) introducing nucleotides having any of Formula I-VII or any combination thereof into a siNA molecule, and (b) assaying the siNA molecule of step (a) under conditions suitable for isolating siNA molecules capable of mediating increased polymerase activity of a cellular polymerase capable of generating additional endogenous siNA molecules having sequence homology to the chemically-modified siNA molecule.

[0171] In one embodiment, the invention features chemically-modified siNA constructs that mediate RNAi against BACE in a cell, wherein the chemical modifications do not significantly effect the interaction of siNA with a target RNA molecule, DNA molecule and/or proteins or other factors that are essential for RNAi in a manner that would decrease the efficacy of RNAi mediated by such siNA constructs.

[0172] In another embodiment, the invention features a method for generating siNA molecules with improved RNAi activity against BACE comprising (a) introducing nucleotides having any of Formula I-VII or any combination thereof into a siNA molecule, and (b) assaying the siNA molecule of step (a) under conditions suitable for isolating siNA molecules having improved RNAi activity.

[0173] In yet another embodiment, the invention features a method for generating siNA molecules with improved RNAi activity against BACE target RNA comprising (a) introducing nucleotides having any of Formula I-VII or any combination thereof into a siNA molecule, and (b) assaying the siNA molecule of step (a) under conditions suitable for isolating siNA molecules having improved RNAi activity against the target RNA.

[0174] In yet another embodiment, the invention features a method for generating siNA molecules with improved RNAi activity against BACE target DNA comprising (a) introducing nucleotides having any of Formula I-VII or any combination thereof into a siNA molecule, and (b) assaying the siNA molecule of step (a) under conditions suitable for isolating siNA molecules having improved RNAi activity against the target DNA.

[0175] In one embodiment, the invention features siNA constructs that mediate RNAi against BACE, wherein the siNA construct comprises one or more chemical modifications described herein that modulates the cellular uptake of the siNA construct.

[0176] In another embodiment, the invention features a method for generating siNA molecules against BACE with improved cellular uptake comprising (a) introducing nucleotides having any of Formula I-VII or any combination thereof into a siNA molecule, and (b) assaying the siNA molecule of step (a) under conditions suitable for isolating siNA molecules having improved cellular uptake.

[0177] In one embodiment, the invention features siNA constructs that mediate RNAi against BACE, wherein the siNA construct comprises one or more chemical modifications described herein that increases the bioavailability of the siNA construct, for example, by attaching polymeric conjugates such as polyethyleneglycol or equivalent conjugates that improve the pharmacokinetics of the siNA construct, or by attaching conjugates that target specific tissue types or cell types in vivo. Non-limiting examples of such conjugates are described in Vargeese et al., U.S. Ser. No. 10/201,394 incorporated by reference herein.

[0178] In one embodiment, the invention features a method for generating siNA molecules of the invention with improved bioavailability comprising (a) introducing a conjugate into the structure of a siNA molecule, and (b) assaying the siNA molecule of step (a) under conditions suitable for isolating siNA molecules having improved bioavailability. Such conjugates can include ligands for cellular receptors, such as peptides derived from naturally occurring protein ligands; protein localization sequences, including cellular ZIP code sequences; antibodies; nucleic acid aptamers; vitamins and other co-factors, such as folate and N-acetylgalactosamine; polymers, such as polyethyleneglycol (PEG); phospholipids; cholesterol; polyamines, such as spermine or spermidine; and others.

[0179] In one embodiment, the invention features a double stranded short interfering nucleic acid (siNA) molecule that comprises a first nucleotide sequence complementary to a target RNA sequence or a portion thereof, and a second sequence having complementarity to said first sequence, wherein said second sequence is chemically modified in a manner that it can no longer act as a guide sequence for efficiently mediating RNA interference and/or be recognized by cellular proteins that facilitate RNAi.

[0180] In one embodiment, the invention features a double stranded short interfering nucleic acid (siNA) molecule that comprises a first nucleotide sequence complementary to a target RNA sequence or a portion thereof, and a second sequence having complementarity to said first sequence, wherein the second sequence is designed or modified in a manner that prevents its entry into the RNAi pathway as a guide sequence or as a sequence that is complementary to a target nucleic acid (e.g., RNA) sequence. Such design or modifications are expected to enhance the activity of siNA and/or improve the specificity of siNA molecules of the invention. These modifications are also expected to minimize any off-target effects and/or associated toxicity.

[0181] In one embodiment, the invention features a double stranded short interfering nucleic acid (siNA) molecule that comprises a first nucleotide sequence complementary to a target RNA sequence or a portion thereof, and a second sequence having complementarity to said first sequence, wherein said second sequence is incapable of acting as a guide sequence for mediating RNA interference.

[0182] In one embodiment, the invention features a double stranded short interfering nucleic acid (siNA) molecule that comprises a first nucleotide sequence complementary to a target RNA sequence or a portion thereof, and a second sequence having complementarity to said first sequence, wherein said second sequence does not have a terminal 5′-hydroxyl (5′-OH) or 5′-phosphate group.

[0183] In one embodiment, the invention features a double stranded short interfering nucleic acid (siNA) molecule that comprises a first nucleotide sequence complementary to a target RNA sequence or a portion thereof, and a second sequence having complementarity to said first sequence, wherein said second sequence comprises a terminal cap moiety at the 5′-end of said second sequence. In one embodiment, the terminal cap moiety comprises an inverted abasic, inverted deoxy abasic, inverted nucleotide moiety, a group shown in FIG. 10, an alkyl or cycloalkyl group, a heterocycle, or any other group that prevents RNAi activity in which the second sequence serves as a guide sequence or template for RNAi.

[0184] In one embodiment, the invention features a double stranded short interfering nucleic acid (siNA) molecule that comprises a first nucleotide sequence complementary to a target RNA sequence or a portion thereof, and a second sequence having complementarity to said first sequence, wherein said second sequence comprises a terminal cap moiety at the 5′-end and 3′-end of said second sequence. In one embodiment, each terminal cap moiety individually comprises an inverted abasic, inverted deoxy abasic, inverted nucleotide moiety, a group shown in FIG. 10, an alkyl or cycloalkyl group, a heterocycle, or any other group that prevents RNAi activity in which the second sequence serves as a guide sequence or template for RNAi.

[0185] In one embodiment, the invention features a method for generating siNA molecules of the invention with improved specificity for down regulating or inhibiting the expression of a target nucleic acid (e.g., a DNA or RNA such as a gene or its corresponding RNA), comprising (a) introducing one or more chemical modifications into the structure of a siNA molecule, and (b) assaying the siNA molecule of step (a) under conditions suitable for isolating siNA molecules having improved specificity. In another embodiment, the chemical modification used to improve specificity comprises terminal cap modifications at the 5′-end, 3′-end, or both 5′ and 3′-ends of the siNA molecule. The terminal cap modifications can comprise, for example, structures shown in FIG. 10 (e.g. inverted deoxyabasic moieties) or any other chemical modification that renders a portion of the siNA molecule (e.g. the sense strand) incapable of mediating RNA interference against an off target nucleic acid sequence. In a non-limiting example, a siNA molecule is designed such that only the antisense sequence of the siNA molecule can serve as a guide sequence for RISC mediated degradation of a corresponding target RNA sequence. This can be accomplished by rendering the sense sequence of the siNA inactive by introducing chemical modifications to the sense strand that preclude recognition of the sense strand as a guide sequence by RNAi machinery. In one embodiment, such chemical modifications comprise any chemical group at the 5′-end of the sense strand of the siNA, or any other group that serves to render the sense strand inactive as a guide sequence for mediating RNA interference. These modifications, for example, can result in a molecule where the 5′-end of the sense strand no longer has a free 5′-hydroxyl (5′-OH) or a free 5′-phosphate group (e.g., phosphate, diphosphate, triphosphate, cyclic phosphate etc.). Non-limiting examples of such siNA constructs are described herein, such as “Stab 9/10”, “Stab 7/8”, “Stab 7/19”, “Stab 17/22”, “Stab 23/24”, and “Stab 24/25” chemistries and variants thereof (see Table IV) wherein the 5′-end and 3′-end of the sense strand of the siNA do not comprise a hydroxyl group or phosphate group.

[0186] In one embodiment, the invention features a method for generating siNA molecules of the invention with improved specificity for down regulating or inhibiting the expression of a target nucleic acid (e.g., a DNA or RNA such as a gene or its corresponding RNA), comprising introducing one or more chemical modifications into the structure of a siNA molecule that prevent a strand or portion of the siNA molecule from acting as a template or guide sequence for RNAi activity. In one embodiment, the inactive strand or sense region of the siNA molecule is the sense strand or sense region of the siNA molecule, i.e. the strand or region of the siNA that does not have complementarity to the target nucleic acid sequence. In one embodiment, such chemical modifications comprise any chemical group at the 5′-end of the sense strand or region of the siNA that does not comprise a 5′-hydroxyl (5′-OH) or 5′-phosphate group, or any other group that serves to render the sense strand or sense region inactive as a guide sequence for mediating RNA interference. Non-limiting examples of such siNA constructs are described herein, such as “Stab 9/10”, “Stab 7/8”, “Stab 7/19”, “Stab 17/22”, “Stab 23/24”, and “Stab 24/25” chemistries and variants thereof (see Table IV) wherein the 5′-end and 3′-end of the sense strand of the siNA do not comprise a hydroxyl group or phosphate group.

[0187] In one embodiment, the invention features a method for screening siNA molecules that are active in mediating RNA interference against a target nucleic acid sequence comprising (a) generating a plurality of unmodified siNA molecules, (b) screening the siNA molecules of step (a) under conditions suitable for isolating siNA molecules that are active in mediating RNA interference against the target nucleic acid sequence, and (c) introducing chemical modifications (e.g. chemical modifications as described herein or as otherwise known in the art) into the active siNA molecules of (b). In one embodiment, the method further comprises re-screening the chemically modified siNA molecules of step (c) under conditions suitable for isolating chemically modified siNA molecules that are active in mediating RNA interference against the target nucleic acid sequence.

[0188] In one embodiment, the invention features a method for screening chemically modified siNA molecules that are active in mediating RNA interference against a target nucleic acid sequence comprising (a) generating a plurality of chemically modified siNA molecules (e.g. siNA molecules as described herein or as otherwise known in the art), and (b) screening the siNA molecules of step (a) under conditions suitable for isolating chemically modified siNA molecules that are active in mediating RNA interference against the target nucleic acid sequence.

[0189] The term “ligand” refers to any compound or molecule, such as a drug, peptide, hormone, or neurotransmitter, that is capable of interacting with another compound, such as a receptor, either directly or indirectly. The receptor that interacts with a ligand can be present on the surface of a cell or can alternately be an intercullular receptor. Interaction of the ligand with the receptor can result in a biochemical reaction, or can simply be a physical interaction or association.

[0190] In another embodiment, the invention features a method for generating siNA molecules of the invention with improved bioavailability comprising (a) introducing an excipient formulation to a siNA molecule, and (b) assaying the siNA molecule of step (a) under conditions suitable for isolating siNA molecules having improved bioavailability. Such excipients include polymers such as cyclodextrins, lipids, cationic lipids, polyamines, phospholipids, nanoparticles, receptors, ligands, and others.

[0191] In another embodiment, the invention features a method for generating siNA molecules of the invention with improved bioavailability comprising (a) introducing nucleotides having any of Formulae I-VII or any combination thereof into a siNA molecule, and (b) assaying the siNA molecule of step (a) under conditions suitable for isolating siNA molecules having improved bioavailability.

[0192] In another embodiment, polyethylene glycol (PEG) can be covalently attached to siNA compounds of the present invention. The attached PEG can be any molecular weight, preferably from about 2,000 to about 50,000 daltons (Da).

[0193] The present invention can be used alone or as a component of a kit having at least one of the reagents necessary to carry out the in vitro or in vivo introduction of RNA to test samples and/or subjects. For example, preferred components of the kit include a siNA molecule of the invention and a vehicle that promotes introduction of the siNA into cells of interest as described herein (e.g., using lipids and other methods of transfection known in the art, see for example Beigelman et al, U.S. Pat. No. 6,395,713). The kit can be used for target validation, such as in determining gene function and/or activity, or in drug optimization, and in drug discovery (see for example Usman et al., U.S. Ser. No. 60/402,996). Such a kit can also include instructions to allow a user of the kit to practice the invention.

[0194] The term “short interfering nucleic acid”, “siNA”, “short interfering RNA”, “siRNA”, “short interfering nucleic acid molecule”, “short interfering oligonucleotide molecule”, or “chemically-modified short interfering nucleic acid molecule” as used herein refers to any nucleic acid molecule capable of inhibiting or down regulating gene expression or viral replication, for example by mediating RNA interference “RNAi” or gene silencing in a sequence-specific manner; see for example Zamore et al., 2000, Cell, 101, 25-33; Bass, 2001, Nature, 411, 428-429; Elbashir et al., 2001, Nature, 411, 494-498; and Kreutzer et al., International PCT Publication No. WO 00/44895; Zernicka-Goetz et al, International PCT Publication No. WO 01/36646; Fire, International PCT Publication No. WO 99/32619; Plaetinck et al., International PCT Publication No. WO 00/01846; Mello and Fire, International PCT Publication No. WO 01/29058; Deschamps-Depaillette, International PCT Publication No. WO 99/07409; and Li et al., International PCT Publication No. WO 00/44914; Allshire, 2002, Science, 297, 1818-1819; Volpe et al., 2002, Science, 297, 1833-1837; Jenuwein, 2002, Science, 297, 2215-2218; and Hall et al., 2002, Science, 297, 2232-2237; Hutvagner and Zamore, 2002, Science, 297, 2056-60; McManus et al., 2002, RNA, 8, 842-850; Reinhart et al., 2002, Gene & Dev., 16, 1616-1626; and Reinhart & Bartel, 2002, Science, 297, 1831). Non limiting examples of siNA molecules of the invention are shown in FIGS. 4-6, and Tables II and III herein. For example the siNA can be a double-stranded polynucleotide molecule comprising self-complementary sense and antisense regions, wherein the antisense region comprises nucleotide sequence that is complementary to nucleotide sequence in a target nucleic acid molecule or a portion thereof and the sense region having nucleotide sequence corresponding to the target nucleic acid sequence or a portion thereof. The siNA can be assembled from two separate oligonucleotides, where one strand is the sense strand and the other is the antisense strand, wherein the antisense and sense strands are self-complementary (i.e. each strand comprises nucleotide sequence that is complementary to nucleotide sequence in the other strand; such as where the antisense strand and sense strand form a duplex or double stranded structure, for example wherein the double stranded region is about 19 base pairs); the antisense strand comprises nucleotide sequence that is complementary to nucleotide sequence in a target nucleic acid molecule or a portion thereof and the sense strand comprises nucleotide sequence corresponding to the target nucleic acid sequence or a portion thereof. Alternatively, the siNA is assembled from a single oligonucleotide, where the self-complementary sense and antisense regions of the siNA are linked by means of a nucleic acid based or non-nucleic acid-based linker(s). The siNA can be a polynucleotide with a duplex, asymmetric duplex, hairpin or asymmetric hairpin secondary structure, having self-complementary sense and antisense regions, wherein the antisense region comprises nucleotide sequence that is complementary to nucleotide sequence in a separate target nucleic acid molecule or a portion thereof and the sense region having nucleotide sequence corresponding to the target nucleic acid sequence or a portion thereof. The siNA can be a circular single-stranded polynucleotide having two or more loop structures and a stem comprising self-complementary sense and antisense regions, wherein the antisense region comprises nucleotide sequence that is complementary to nucleotide sequence in a target nucleic acid molecule or a portion thereof and the sense region having nucleotide sequence corresponding to the target nucleic acid sequence or a portion thereof, and wherein the circular polynucleotide can be processed either in vivo or in vitro to generate an active siNA molecule capable of mediating RNAi. The siNA can also comprise a single stranded polynucleotide having nucleotide sequence complementary to nucleotide sequence in a target nucleic acid molecule or a portion thereof (for example, where such siNA molecule does not require the presence within the siNA molecule of nucleotide sequence corresponding to the target nucleic acid sequence or a portion thereof), wherein the single stranded polynucleotide can further comprise a terminal phosphate group, such as a 5′-phosphate (see for example Martinez et al., 2002, Cell, 110, 563-574 and Schwarz et al., 2002, Molecular Cell, 10, 537-568), or 5′,3′-diphosphate. In certain embodiments, the siNA molecule of the invention comprises separate sense and antisense sequences or regions, wherein the sense and antisense regions are covalently linked by nucleotide or non-nucleotide linkers molecules as is known in the art, or are alternately non-covalently linked by ionic interactions, hydrogen bonding, van der waals interactions, hydrophobic interactions, and/or stacking interactions. In certain embodiments, the siNA molecules of the invention comprise nucleotide sequence that is complementary to nucleotide sequence of a target gene. In another embodiment, the siNA molecule of the invention interacts with nucleotide sequence of a target gene in a manner that causes inhibition of expression of the target gene. As used herein, siNA molecules need not be limited to those molecules containing only RNA, but further encompasses chemically-modified nucleotides and non-nucleotides. In certain embodiments, the short interfering nucleic acid molecules of the invention lack 2′-hydroxy (2′-OH) containing nucleotides. Applicant describes in certain embodiments short interfering nucleic acids that do not require the presence of nucleotides having a 2′-hydroxy group for mediating RNAi and as such, short interfering nucleic acid molecules of the invention optionally do not include any ribonucleotides (e.g., nucleotides having a 2′-OH group). Such siNA molecules that do not require the presence of ribonucleotides within the siNA molecule to support RNAi can however have an attached linker or linkers or other attached or associated groups, moieties, or chains containing one or more nucleotides with 2′-OH groups. Optionally, siNA molecules can comprise ribonucleotides at about 5, 10, 20, 30, 40, or 50% of the nucleotide positions. The modified short interfering nucleic acid molecules of the invention can also be referred to as short interfering modified oligonucleotides “siMON.” As used herein, the term siNA is meant to be equivalent to other terms used to describe nucleic acid molecules that are capable of mediating sequence specific RNAi, for example short interfering RNA (siRNA), double-stranded RNA (dsRNA), micro-RNA (miRNA), short hairpin RNA (shRNA), short interfering oligonucleotide, short interfering nucleic acid, short interfering modified oligonucleotide, chemically-modified siRNA, post-transcriptional gene silencing RNA (ptgsRNA), and others. In addition, as used herein, the term RNAi is meant to be equivalent to other terms used to describe sequence specific RNA interference, such as post transcriptional gene silencing, translational inhibition, or epigenetics. For example, siNA molecules of the invention can be used to epigenetically silence genes at both the post-transcriptional level or the pre-transcriptional level. In a non-limiting example, epigenetic regulation of gene expression by siNA molecules of the invention can result from siNA mediated modification of chromatin structure or methylation pattern to alter gene expression (see, for example, Verdel et al., 2004, Science, 303, 672-676; Pal-Bhadra et al., 2004, Science, 303, 669-672; Allshire, 2002, Science, 297, 1818-1819; Volpe et al., 2002, Science, 297, 1833-1837; Jenuwein, 2002, Science, 297, 2215-2218; and Hall et al., 2002, Science, 297, 2232-2237).

[0195] In one embodiment, a siNA molecule of the invention is a duplex forming oligonucleotide “DFO”, (see for example FIGS. 14-15 and Vaish et al., U.S. Ser. No. 10/727,780 filed Dec. 3, 2003 and International PCT Application No. US04/16390, filed May 24, 2004).

[0196] In one embodiment, a siNA molecule of the invention is a multifunctional siNA, (see for example FIGS. 16-21 and Jadhav et al., U.S. Ser. No. 60/543,480 filed Feb. 10, 2004 and International PCT Application No. US04/16390, filed May 24, 2004). The multifunctional siNA of the invention can comprise sequence targeting, for example, two regions of BACE RNA (see for example target sequences in Tables II and III).

[0197] By “asymmetric hairpin” as used herein is meant a linear siNA molecule comprising an antisense region, a loop portion that can comprise nucleotides or non-nucleotides, and a sense region that comprises fewer nucleotides than the antisense region to the extent that the sense region has enough complementary nucleotides to base pair with the antisense region and form a duplex with loop. For example, an asymmetric hairpin siNA molecule of the invention can comprise an antisense region having length sufficient to mediate RNAi in a cell or in vitro system (e.g. about 19 to about 22, or about 19, 20, 21, or 22 nucleotides) and a loop region comprising about 4 to about 8 (e.g., about 4, 5, 6, 7, or 8) nucleotides, and a sense region having about 3 to about 18 (e.g., about 3, 4, 5, 6, 7, 8, 9, 10, 11, 12, 13, 14, 15, 16, 17, or 18) nucleotides that are complementary to the antisense region. The asymmetric hairpin siNA molecule can also comprise a 5′-terminal phosphate group that can be chemically modified. The loop portion of the asymmetric hairpin siNA molecule can comprise nucleotides, non-nucleotides, linker molecules, or conjugate molecules as described herein.

[0198] By “asymmetric duplex” as used herein is meant a siNA molecule having two separate strands comprising a sense region and an antisense region, wherein the sense region comprises fewer nucleotides than the antisense region to the extent that the sense region has enough complementary nucleotides to base pair with the antisense region and form a duplex. For example, an asymmetric duplex siNA molecule of the invention can comprise an antisense region having length sufficient to mediate RNAi in a cell or in vitro system e.g. about 19 to about 22 (e.g. about 19, 20, 21, or 22) nucleotides and a sense region having about 3 to about 18 (e.g., about 3, 4, 5, 6, 7, 8, 9, 10, 11, 12, 13, 14, 15, 16, 17, or 18) nucleotides that are complementary to the antisense region.

[0199] By “modulate” is meant that the expression of the gene, or level of RNA molecule or equivalent RNA molecules encoding one or more proteins or protein subunits, or activity of one or more proteins or protein subunits is up regulated or down regulated, such that expression, level, or activity is greater than or less than that observed in the absence of the modulator. For example, the term “modulate” can mean “inhibit,” but the use of the word “modulate” is not limited to this definition.

[0200] By “inhibit”, “down-regulate”, or “reduce”, it is meant that the expression of the gene, or level of RNA molecules or equivalent RNA molecules encoding one or more proteins or protein subunits, or activity of one or more proteins or protein subunits, is reduced below that observed in the absence of the nucleic acid molecules (e.g., siNA) of the invention. In one embodiment, inhibition, down-regulation or reduction with an siNA molecule is below that level observed in the presence of an inactive or attenuated molecule. In another embodiment, inhibition, down-regulation, or reduction with siNA molecules is below that level observed in the presence of, for example, an siNA molecule with scrambled sequence or with mismatches. In another embodiment, inhibition, down-regulation, or reduction of gene expression with a nucleic acid molecule of the instant invention is greater in the presence of the nucleic acid molecule than in its absence. In one embodiment, inhibition, down regulation, or reduction of gene expression is associated with post transcriptional silencing, such as RNAi mediated cleavage of a target nucleic acid molecule (e.g. RNA) or inhibition of translation. In one embodiment, inhibition, down regulation, or reduction of gene expression is associated with pretranscriptional silencing.

[0201] By “gene”, or “target gene”, is meant, a nucleic acid that encodes an RNA, for example, nucleic acid sequences including, but not limited to, structural genes encoding a polypeptide. A gene or target gene can also encode a functional RNA (fRNA) or non-coding RNA (ncRNA), such as small temporal RNA (stRNA), micro RNA (miRNA), small nuclear RNA (snRNA), short interfering RNA (siRNA), small nucleolar RNA (snRNA), ribosomal RNA (rRNA), transfer RNA (tRNA) and precursor RNAs thereof. Such non-coding RNAs can serve as target nucleic acid molecules for siNA mediated RNA interference in modulating the activity of fRNA or ncRNA involved in functional or regulatory cellular processes. Abberant fRNA or ncRNA activity leading to disease can therefore be modulated by siNA molecules of the invention. siNA molecules targeting FRNA and ncRNA can also be used to manipulate or alter the genotype or phenotype of a subject, organism or cell, by intervening in cellular processes such as genetic imprinting, transcription, translation, or nucleic acid processing (e.g., transamination, methylation etc.). The target gene can be a gene derived from a cell, an endogenous gene, a transgene, or exogenous genes such as genes of a pathogen, for example a virus, which is present in the cell after infection thereof. The cell containing the target gene can be derived from or contained in any organism, for example a plant, animal, protozoan, virus, bacterium, or fungus. Non-limiting examples of plants include monocots, dicots, or gymnosperms. Non-limiting examples of animals include vertebrates or invertebrates. Non-limiting examples of fungi include molds or yeasts. For a review, see for example Snyder and Gerstein, 2003, Science, 300, 258-260.

[0202] By “non-canonical base pair” is meant any non-Watson Crick base pair, such as mismatches and/or wobble base pairs, including flipped mismatches, single hydrogen bond mismatches, trans-type mismatches, triple base interactions, and quadruple base interactions. Non-limiting examples of such non-canonical base pairs include, but are not limited to, AC reverse Hoogsteen, AC wobble, AU reverse Hoogsteen, GU wobble, AA N7 amino, CC 2-carbonyl-amino(H1)-N3-amino(H2), GA sheared, UC 4-carbonyl-amino, UU imino-carbonyl, AC reverse wobble, AU Hoogsteen, AU reverse Watson Crick, CG reverse Watson Crick, GC N3-amino-amino N3, AA N1-amino symmetric, AA N7-amino symmetric, GA N7-N1 amino-carbonyl, GA+ carbonyl-amino N7-N1, GG N1-carbonyl symmetric, GG N3-amino symmetric, CC carbonyl-amino symmetric, CC N3-amino symmetric, UU 2-carbonyl-imino symmetric, UU 4-carbonyl-imino symmetric, AA amino-N3, AA N1-amino, AC amino 2-carbonyl, AC N3-amino, AC N7-amino, AU amino-4-carbonyl, AU N1-imino, AU N3-imino, AU N7-imino, CC carbonyl-amino, GA amino-N1, GA amino-N7, GA carbonyl-amino, GA N3-amino, GC amino-N3, GC carbonyl-amino, GC N3-amino, GC N7-amino, GG amino-N7, GG carbonyl-imino, GG N7-amino, GU amino-2-carbonyl, GU carbonyl-imino, GU imino-2-carbonyl, GU N7-imino, psiU imino-2-carbonyl, UC 4-carbonyl-amino, UC imino-carbonyl, UU imino-4-carbonyl, AC C2-H—N3, GA carbonyl-C2-H, UU imino-4-carbonyl 2carbonyl-C5-H, AC amino(A) N3(C)-carbonyl, GC imino amino-carbonyl, Gpsi imino-2-carbonyl amino-2-carbonyl, and GU imino amino-2-carbonyl base pairs.

[0203] By “BACE” or “beta secretase” as used herein is meant, BACE protein, peptide, or polypeptide having beta-secretase activity, such as that involved in generating beta-amyloid, for example, sequences encoded by BACE Genbank Accession Nos. shown in Table I. The term BACE also refers to nucleic acid sequences encoding any BACE protein, peptide, or polypeptide having BACE activity. The term “BACE” is also meant to include other BACE encoding sequence, such as BACE isoforms, mutant BACE genes, splice variants of BACE genes, and BACE gene polymorphisms.

[0204] By “APP” or “amyloid precursor protein” as used herein is meant any protein, peptide, or polypeptide that is processed to generate beta-amyloid. The term APP also refers to sequences that encode APP protein, for example, Genbank Accession Nos. shown in Table I. The term APP also refers to nucleic acid sequences encoding any APP protein, peptide, or polypeptide having APP activity. The term “APP” is also meant to include other APP encoding sequence, such as APP isoforms, mutant APP genes, splice variants of APP, and APP gene polymorphisms.

[0205] By “presenillin” or “PS”, i.e, “PS-1” or “PS-2”, or “PSEN”, i.e., “PSEN1” or “PSEN2”, as used herein is meant any protein, peptide, or polypeptide having gamma-secretase activity, such as that involved in generating beta-amyloid. The term PS also refers to sequences that encode presenillin protein, for example, PS-1 or PS-2, (i.e., Genbank Accession Nos. shown in Table I). The term “PS”, for example, “PS-1” or “PS-2”, also refers to nucleic acid sequences encoding any PS protein, peptide, or polypeptide having PS activity. The term “PS”, for example, “PS-1” or “PS-2”, is also meant to include other PS encoding sequence, such as PS isoforms, mutant PS genes, splice variants of PS, and PS gene polymorphisms.

[0206] By “PIN-1” as used herein is meant any protein, peptide, or polypeptide having peptidyl-prolyl cis/trans isomerase activity, such as those involved in the development of Neurofibrillary Tangles. The term PIN-1 also refers to sequences that encode PIN-1 protein, i.e., Genbank Accession Nos. shown in Table I. The term PIN-1 also refers to nucleic acid sequences encoding any PIN-1 protein, peptide, or polypeptide having PIN-1 activity. The term “PIN-1” is also meant to include other PIN-1 encoding sequence, such as PIN-1 isoforms, mutant PIN-1 genes, splice variants of PIN-1, and PIN-1 gene polymorphisms.

[0207] Furthermore, as discussed previously, all embodiments, compositions, methods, and uses described herein using BACE as an examplery gene are equally applicable to APP, PIN-1, and PS (i.e., PS-1, and PS-2) genes.

[0208] By “homologous sequence” is meant, a nucleotide sequence that is shared by one or more polynucleotide sequences, such as genes, gene transcripts and/or non-coding polynucleotides. For example, a homologous sequence can be a nucleotide sequence that is shared by two or more genes encoding related but different proteins, such as different members of a gene family, different protein epitopes, different protein isoforms or completely divergent genes, such as a cytokine and its corresponding receptors. A homologous sequence can be a nucleotide sequence that is shared by two or more non-coding polynucleotides, such as noncoding DNA or RNA, regulatory sequences, introns, and sites of transcriptional control or regulation. Homologous sequences can also include conserved sequence regions shared by more than one polynucleotide sequence. Homology does not need to be perfect homology (e.g., 100%), as partially homologous sequences are also contemplated by the instant invention (e.g., 99%, 98%, 97%, 96%, 95%, 94%, 93%, 92%, 91%, 90%, 89%, 88%, 87%, 86%, 85%, 84%, 83%, 82%, 81%, 80% etc.).

[0209] By “conserved sequence region” is meant, a nucleotide sequence of one or more regions in a polynucleotide does not vary significantly between generations or from one biological system, subject, or organism to another biological system, subject, or organism. The polynucleotide can include both coding and non-coding DNA and RNA.

[0210] By “sense region” is meant a nucleotide sequence of a siNA molecule having complementarity to an antisense region of the siNA molecule. In addition, the sense region of a siNA molecule can comprise a nucleic acid sequence having homology with a target nucleic acid sequence.

[0211] By “antisense region” is meant a nucleotide sequence of a siNA molecule having complementarity to a target nucleic acid sequence. In addition, the antisense region of a siNA molecule can optionally comprise a nucleic acid sequence having complementarity to a sense region of the siNA molecule.

[0212] By “target nucleic acid” is meant any nucleic acid sequence whose expression or activity is to be modulated. The target nucleic acid can be DNA or RNA.

[0213] By “complementarity” is meant that a nucleic acid can form hydrogen bond(s) with another nucleic acid sequence by either traditional Watson-Crick or other non-traditional types. In reference to the nucleic molecules of the present invention, the binding free energy for a nucleic acid molecule with its complementary sequence is sufficient to allow the relevant function of the nucleic acid to proceed, e.g., RNAi activity. Determination of binding free energies for nucleic acid molecules is well known in the art (see, e.g., Turner et al., 1987, CSH Symp. Quant. Biol. LII pp. 123-133; Frier et al., 1986, Proc. Nat. Acad. Sci. USA 83:9373-9377; Turner et al., 1987, J. Am. Chem. Soc. 109:3783-3785). A percent complementarity indicates the percentage of contiguous residues in a nucleic acid molecule that can form hydrogen bonds (e.g., Watson-Crick base pairing) with a second nucleic acid sequence (e.g., 5, 6, 7, 8, 9, or 10 nucleotides out of a total of 10 nucleotides in the first oligonucleotide being based paired to a second nucleic acid sequence having 10 nucleotides represents 50%, 60%, 70%, 80%, 90%, and 100% complementary respectively). “Perfectly complementary” means that all the contiguous residues of a nucleic acid sequence will hydrogen bond with the same number of contiguous residues in a second nucleic acid sequence.

[0214] In one embodiment, siNA molecules of the invention that down regulate or reduce BACE gene expression are used for treating Alzheimer's disease in a subject or organism.

[0215] In one embodiment, the siNA molecules of the invention are used to treat neurodegenerative disorders or conditions, such as dementia, and stroke/cardiovascular accident in a subject or organism.

[0216] In one embodiment of the present invention, each sequence of a siNA molecule of the invention is independently about 18 to about 24 nucleotides in length, in specific embodiments about 18, 19, 20, 21, 22, 23, or 24 nucleotides in length. In another embodiment, the siNA duplexes of the invention independently comprise about 17 to about 23 base pairs (e.g., about 17, 18, 19, 20, 21, 22, or 23). In yet another embodiment, siNA molecules of the invention comprising hairpin or circular structures are about 35 to about 55 (e.g., about 35, 40, 45, 50 or 55) nucleotides in length, or about 38 to about 44 (e.g., about 38, 39, 40, 41, 42, 43, or 44) nucleotides in length and comprising about 16 to about 22 (e.g., about 16, 17, 18, 19, 20, 21 or 22) base pairs. Exemplary siNA molecules of the invention are shown in Table II. Exemplary synthetic siNA molecules of the invention are shown in Table III and/or FIGS. 4-5.

[0217] As used herein “cell” is used in its usual biological sense, and does not refer to an entire multicellular organism, e.g., specifically does not refer to a human. The cell can be present in an organism, e.g., birds, plants and mammals such as humans, cows, sheep, apes, monkeys, swine, dogs, and cats. The cell can be prokaryotic (e.g., bacterial cell) or eukaryotic (e.g., mammalian or plant cell). The cell can be of somatic or germ line origin, totipotent or pluripotent, dividing or non-dividing. The cell can also be derived from or can comprise a gamete or embryo, a stem cell, or a fully differentiated cell.

[0218] The siNA molecules of the invention are added directly, or can be complexed with cationic lipids, packaged within liposomes, or otherwise delivered to target cells or tissues. The nucleic acid or nucleic acid complexes can be locally administered to relevant tissues ex vivo, or in vivo through direct dermal application, transdermal application, or injection, with or without their incorporation in biopolymers. In particular embodiments, the nucleic acid molecules of the invention comprise sequences shown in Tables II-III and/or FIGS. 4-5. Examples of such nucleic acid molecules consist essentially of sequences defined in these tables and figures. Furthermore, the chemically modified constructs described in Table IV can be applied to any siNA sequence of the invention.

[0219] In another aspect, the invention provides mammalian cells containing one or more siNA molecules of this invention. The one or more siNA molecules can independently be targeted to the same or different sites.

[0220] By “RNA” is meant a molecule comprising at least one ribonucleotide residue. By “ribonucleotide” is meant a nucleotide with a hydroxyl group at the 2′ position of a β-D-ribofuranose moiety. The terms include double-stranded RNA, single-stranded RNA, isolated RNA such as partially purified RNA, essentially pure RNA, synthetic RNA, recombinantly produced RNA, as well as altered RNA that differs from naturally occurring RNA by the addition, deletion, substitution and/or alteration of one or more nucleotides. Such alterations can include addition of non-nucleotide material, such as to the end(s) of the siNA or internally, for example at one or more nucleotides of the RNA. Nucleotides in the RNA molecules of the instant invention can also comprise non-standard nucleotides, such as non-naturally occurring nucleotides or chemically synthesized nucleotides or deoxynucleotides. These altered RNAs can be referred to as analogs or analogs of naturally-occurring RNA.

[0221] By “subject” is meant an organism, which is a donor or recipient of explanted cells or the cells themselves. “Subject” also refers to an organism to which the nucleic acid molecules of the invention can be administered. A subject can be a mammal or mammalian cells, including a human or human cells.

[0222] The term “phosphorothioate” as used herein refers to an internucleotide linkage having Formula I, wherein Z and/or W comprise a sulfur atom. Hence, the term phosphorothioate refers to both phosphorothioate and phosphorodithioate internucleotide linkages.

[0223] The term “phosphonoacetate” as used herein refers to an internucleotide linkage having Formula I, wherein Z and/or W comprise an acetyl or protected acetyl group.

[0224] The term “thiophosphonoacetate” as used herein refers to an internucleotide linkage having Formula I, wherein Z comprises an acetyl or protected acetyl group and W comprises a sulfur atom or alternately W comprises an acetyl or protected acetyl group and Z comprises a sulfur atom.

[0225] The term “universal base” as used herein refers to nucleotide base analogs that form base pairs with each of the natural DNA/RNA bases with little discrimination between them. Non-limiting examples of universal bases include C-phenyl, C-naphthyl and other aromatic derivatives, inosine, azole carboxamides, and nitroazole derivatives such as 3-nitropyrrole, 4-nitroindole, 5-nitroindole, and 6-nitroindole as known in the art (see for example Loakes, 2001, Nucleic Acids Research, 29, 2437-2447).

[0226] The term “acyclic nucleotide” as used herein refers to any nucleotide having an acyclic ribose sugar, for example where any of the ribose carbons (C1, C2, C3, C4, or C5), are independently or in combination absent from the nucleotide.

[0227] The nucleic acid molecules of the instant invention, individually, or in combination or in conjunction with other drugs, can be used to for preventing or treating Alzheimer's disease and other neurodegenerative disorders or conditions, such as dementia and stroke/cardiovascular accident in a subject or organism.

[0228] For example, the siNA molecules can be administered to a subject or can be administered to other appropriate cells evident to those skilled in the art, individually or in combination with one or more drugs under conditions suitable for the treatment.

[0229] In a further embodiment, the siNA molecules can be used in combination with other known treatments to prevent or treat Alzheimer's disease and other neurodegenerative disorders or conditions, such as dementia and stroke/cardiovascular accident in a subject or organism. For example, the described molecules could be used in combination with one or more known compounds, treatments, or procedures to prevent or treat Alzheimer's disease and other neurodegenerative disorders or conditions, such as dementia and stroke/cardiovascular accident in a subject or organism as are known in the art.

[0230] In one embodiment, the invention features an expression vector comprising a nucleic acid sequence encoding at least one siNA molecule of the invention, in a manner which allows expression of the siNA molecule. For example, the vector can contain sequence(s) encoding both strands of a siNA molecule comprising a duplex. The vector can also contain sequence(s) encoding a single nucleic acid molecule that is self-complementary and thus forms a siNA molecule. Non-limiting examples of such expression vectors are described in Paul et al., 2002, Nature Biotechnology, 19, 505; Miyagishi and Taira, 2002, Nature Biotechnology, 19, 497; Lee et al., 2002, Nature Biotechnology, 19, 500; and Novina et al., 2002, Nature Medicine, advance online publication doi: 10.1038/nm725.

[0231] In another embodiment, the invention features a mammalian cell, for example, a human cell, including an expression vector of the invention.

[0232] In yet another embodiment, the expression vector of the invention comprises a sequence for a siNA molecule having complementarity to a RNA molecule referred to by a Genbank Accession numbers, for example Genbank Accession Nos. shown in Table I.

[0233] In one embodiment, an expression vector of the invention comprises a nucleic acid sequence encoding two or more siNA molecules, which can be the same or different.

[0234] In another aspect of the invention, siNA molecules that interact with target RNA molecules and down-regulate gene encoding target RNA molecules (for example target RNA molecules referred to by Genbank Accession numbers herein) are expressed from transcription units inserted into DNA or RNA vectors. The recombinant vectors can be DNA plasmids or viral vectors. siNA expressing viral vectors can be constructed based on, but not limited to, adeno-associated virus, retrovirus, adenovirus, or alphavirus. The recombinant vectors capable of expressing the siNA molecules can be delivered as described herein, and persist in target cells. Alternatively, viral vectors can be used that provide for transient expression of siNA molecules. Such vectors can be repeatedly administered as necessary. Once expressed, the siNA molecules bind and down-regulate gene function or expression via RNA interference (RNAi). Delivery of siNA expressing vectors can be systemic, such as by intravenous or intramuscular administration, by administration to target cells ex-planted from a subject followed by reintroduction into the subject, or by any other means that would allow for introduction into the desired target cell.

[0235] By “vectors” is meant any nucleic acid- and/or viral-based technique used to deliver a desired nucleic acid.

[0236] Other features and advantages of the invention will be apparent from the following description of the preferred embodiments thereof, and from the claims.

### BRIEF DESCRIPTION OF THE DRAWINGS

[0237] FIG. 1 shows a non-limiting example of a scheme for the synthesis of siNA molecules. The complementary siNA sequence strands, strand 1 and strand 2, are synthesized in tandem and are connected by a cleavable linkage, such as a nucleotide succinate or abasic succinate, which can be the same or different from the cleavable linker used for solid phase synthesis on a solid support. The synthesis can be either solid phase or solution phase, in the example shown, the synthesis is a solid phase synthesis. The synthesis is performed such that a protecting group, such as a dimethoxytrityl group, remains intact on the terminal nucleotide of the tandem oligonucleotide. Upon cleavage and deprotection of the oligonucleotide, the two siNA strands spontaneously hybridize to form a siNA duplex, which allows the purification of the duplex by utilizing the properties of the terminal protecting group, for example by applying a trityl on purification method wherein only duplexes/oligonucleotides with the terminal protecting group are isolated.

[0238] FIG. 2 shows a MALDI-TOF mass spectrum of a purified siNA duplex synthesized by a method of the invention. The two peaks shown correspond to the predicted mass of the separate siNA sequence strands. This result demonstrates that the siNA duplex generated from tandem synthesis can be purified as a single entity using a simple trityl-on purification methodology.

[0239] FIG. 3 shows a non-limiting proposed mechanistic representation of target RNA degradation involved in RNAi. Double-stranded RNA (dsRNA), which is generated by RNA-dependent RNA polymerase (RdRP) from foreign single-stranded RNA, for example viral, transposon, or other exogenous RNA, activates the DICER enzyme that in turn generates siNA duplexes. Alternately, synthetic or expressed siNA can be introduced directly into a cell by appropriate means. An active siNA complex forms which recognizes a target RNA, resulting in degradation of the target RNA by the RISC endonuclease complex or in the synthesis of additional RNA by RNA-dependent RNA polymerase (RdRP), which can activate DICER and result in additional siNA molecules, thereby amplifying the RNAi response.

[0240] FIG. 4A-F shows non-limiting examples of chemically-modified siNA constructs of the present invention. In the figure, N stands for any nucleotide (adenosine, guanosine, cytosine, uridine, or optionally thymidine, for example thymidine can be substituted in the overhanging regions designated by parenthesis (N N). Various modifications are shown for the sense and antisense strands of the siNA constructs.

[0241] FIG. 4A: The sense strand comprises 21 nucleotides wherein the two terminal 3′-nucleotides are optionally base paired and wherein all nucleotides present are ribonucleotides except for (N N) nucleotides, which can comprise ribonucleotides, deoxynucleotides, universal bases, or other chemical modifications described herein. The antisense strand comprises 21 nucleotides, optionally having a 3′-terminal glyceryl moiety wherein the two terminal 3′-nucleotides are optionally complementary to the target RNA sequence, and wherein all nucleotides present are ribonucleotides except for (N N) nucleotides, which can comprise ribonucleotides, deoxynucleotides, universal bases, or other chemical modifications described herein. A modified internucleotide linkage, such as a phosphorothioate, phosphorodithioate or other modified internucleotide linkage as described herein, shown as “s”, optionally connects the (N N) nucleotides in the antisense strand.

[0242] FIG. 4B: The sense strand comprises 21 nucleotides wherein the two terminal 3′-nucleotides are optionally base paired and wherein all pyrimidine nucleotides that may be present are 2′deoxy-2′-fluoro modified nucleotides and all purine nucleotides that may be present are 2′-O-methyl modified nucleotides except for (N N) nucleotides, which can comprise ribonucleotides, deoxynucleotides, universal bases, or other chemical modifications described herein. The antisense strand comprises 21 nucleotides, optionally having a 3′-terminal glyceryl moiety and wherein the two terminal 3′-nucleotides are optionally complementary to the target RNA sequence, and wherein all pyrimidine nucleotides that may be present are 2′-deoxy-2′-fluoro modified nucleotides and all purine nucleotides that may be present are 2′-O-methyl modified nucleotides except for (N N) nucleotides, which can comprise ribonucleotides, deoxynucleotides, universal bases, or other chemical modifications described herein. A modified internucleotide linkage, such as a phosphorothioate, phosphorodithioate or other modified internucleotide linkage as described herein, shown as “s”, optionally connects the (N N) nucleotides in the sense and antisense strand.

[0243] FIG. 4C: The sense strand comprises 21 nucleotides having 5′- and 3′-terminal cap moieties wherein the two terminal 3′-nucleotides are optionally base paired and wherein all pyrimidine nucleotides that may be present are 2′-O-methyl or 2′-deoxy-2′-fluoro modified nucleotides except for (N N) nucleotides, which can comprise ribonucleotides, deoxynucleotides, universal bases, or other chemical modifications described herein. The antisense strand comprises 21 nucleotides, optionally having a 3′-terminal glyceryl moiety and wherein the two terminal 3′-nucleotides are optionally complementary to the target RNA sequence, and wherein all pyrimidine nucleotides that may be present are 2′-deoxy-2′-fluoro modified nucleotides except for (N N) nucleotides, which can comprise ribonucleotides, deoxynucleotides, universal bases, or other chemical modifications described herein. A modified internucleotide linkage, such as a phosphorothioate, phosphorodithioate or other modified internucleotide linkage as described herein, shown as “s”, optionally connects the (N N) nucleotides in the antisense strand.

[0244] FIG. 4D: The sense strand comprises 21 nucleotides having 5′- and 3′-terminal cap moieties wherein the two terminal 3′-nucleotides are optionally base paired and wherein all pyrimidine nucleotides that may be present are 2′-deoxy-2′-fluoro modified nucleotides except for (N N) nucleotides, which can comprise ribonucleotides, deoxynucleotides, universal bases, or other chemical modifications described herein and wherein and all purine nucleotides that may be present are 2′-deoxy nucleotides. The antisense strand comprises 21 nucleotides, optionally having a 3′-terminal glyceryl moiety and wherein the two terminal 3′-nucleotides are optionally complementary to the target RNA sequence, wherein all pyrimidine nucleotides that may be present are 2′-deoxy-2′-fluoro modified nucleotides and all purine nucleotides that may be present are 2′-O-methyl modified nucleotides except for (N N) nucleotides, which can comprise ribonucleotides, deoxynucleotides, universal bases, or other chemical modifications described herein. A modified internucleotide linkage, such as a phosphorothioate, phosphorodithioate or other modified internucleotide linkage as described herein, shown as “s”, optionally connects the (N N) nucleotides in the antisense strand.

[0245] FIG. 4E: The sense strand comprises 21 nucleotides having 5′- and 3′-terminal cap moieties wherein the two terminal 3′-nucleotides are optionally base paired and wherein all pyrimidine nucleotides that may be present are 2′-deoxy-2′-fluoro modified nucleotides except for (N N) nucleotides, which can comprise ribonucleotides, deoxynucleotides, universal bases, or other chemical modifications described herein. The antisense strand comprises 21 nucleotides, optionally having a 3′-terminal glyceryl moiety and wherein the two terminal 3′-nucleotides are optionally complementary to the target RNA sequence, and wherein all pyrimidine nucleotides that may be present are 2′-deoxy-2′-fluoro modified nucleotides and all purine nucleotides that may be present are 2′-O-methyl modified nucleotides except for (N N) nucleotides, which can comprise ribonucleotides, deoxynucleotides, universal bases, or other chemical modifications described herein. A modified internucleotide linkage, such as a phosphorothioate, phosphorodithioate or other modified internucleotide linkage as described herein, shown as “s”, optionally connects the (N N) nucleotides in the antisense strand.

[0246] FIG. 4F: The sense strand comprises 21 nucleotides having 5′- and 3′-terminal cap moieties wherein the two terminal 3′-nucleotides are optionally base paired and wherein all pyrimidine nucleotides that may be present are 2′-deoxy-2′-fluoro modified nucleotides except for (N N) nucleotides, which can comprise ribonucleotides, deoxynucleotides, universal bases, or other chemical modifications described herein and wherein and all purine nucleotides that may be present are 2′-deoxy nucleotides. The antisense strand comprises 21 nucleotides, optionally having a 3′-terminal glyceryl moiety and wherein the two terminal 3′-nucleotides are optionally complementary to the target RNA sequence, and having one 3′-terminal phosphorothioate internucleotide linkage and wherein all pyrimidine nucleotides that may be present are 2′-deoxy-2′-fluoro modified nucleotides and all purine nucleotides that may be present are 2′-deoxy nucleotides except for (N N) nucleotides, which can comprise ribonucleotides, deoxynucleotides, universal bases, or other chemical modifications described herein. A modified internucleotide linkage, such as a phosphorothioate, phosphorodithioate or other modified internucleotide linkage as described herein, shown as “s”, optionally connects the (N N) nucleotides in the antisense strand. The antisense strand of constructs A-F comprise sequence complementary to any target nucleic acid sequence of the invention. Furthermore, when a glyceryl moiety (L) is present at the 3′-end of the antisense strand for any construct shown in FIG. 4A-F, the modified internucleotide linkage is optional.

[0247] FIG. 5A-F shows non-limiting examples of specific chemically-modified siNA sequences of the invention. A-F applies the chemical modifications described in FIG. 4A-F to a BACE siNA sequence. Such chemical modifications can be applied to any BACE sequence and/or BACE polymorphism sequence.

[0248] FIG. 6 shows non-limiting examples of different siNA constructs of the invention. The examples shown (constructs 1, 2, and 3) have 19 representative base pairs; however, different embodiments of the invention include any number of base pairs described herein. Bracketed regions represent nucleotide overhangs, for example, comprising about 1, 2, 3, or 4 nucleotides in length, preferably about 2 nucleotides. Constructs 1 and 2 can be used independently for RNAi activity. Construct 2 can comprise a polynucleotide or non-nucleotide linker, which can optionally be designed as a biodegradable linker. In one embodiment, the loop structure shown in construct 2 can comprise a biodegradable linker that results in the formation of construct 1 in vivo and/or in vitro. In another example, construct 3 can be used to generate construct 2 under the same principle wherein a linker is used to generate the active siNA construct 2 in vivo and/or in vitro, which can optionally utilize another biodegradable linker to generate the active siNA construct 1 in vivo and/or in vitro. As such, the stability and/or activity of the siNA constructs can be modulated based on the design of the siNA construct for use in vivo or in vitro and/or in vitro.

[0249] FIG. 7A-C is a diagrammatic representation of a scheme utilized in generating an expression cassette to generate siNA hairpin constructs.

[0250] FIG. 7A: A DNA oligomer is synthesized with a 5′-restriction site (R1) sequence followed by a region having sequence identical (sense region of siNA) to a predetermined BACE target sequence, wherein the sense region comprises, for example, about 19, 20, 21, or 22 nucleotides (N) in length, which is followed by a loop sequence of defined sequence (X), comprising, for example, about 3 to about 10 nucleotides.

[0251] FIG. 7B: The synthetic construct is then extended by DNA polymerase to generate a hairpin structure having self-complementary sequence that will result in a siNA transcript having specificity for a BACE target sequence and having self-complementary sense and antisense regions.

[0252] FIG. 7C: The construct is heated (for example to about 95° C.) to linearize the sequence, thus allowing extension of a complementary second DNA strand using a primer to the 3′-restriction sequence of the first strand. The double-stranded DNA is then inserted into an appropriate vector for expression in cells. The construct can be designed such that a 3′-terminal nucleotide overhang results from the transcription, for example, by engineering restriction sites and/or utilizing a poly-U termination region as described in Paul et al, 2002, Nature Biotechnology, 29, 505-508.

[0253] FIG. 8A-C is a diagrammatic representation of a scheme utilized in generating an expression cassette to generate double-stranded siNA constructs.

[0254] FIG. 8A: A DNA oligomer is synthesized with a 5′-restriction (R1) site sequence followed by a region having sequence identical (sense region of siNA) to a predetermined BACE target sequence, wherein the sense region comprises, for example, about 19, 20, 21, or 22 nucleotides (N) in length, and which is followed by a 3′-restriction site (R2) which is adjacent to a loop sequence of defined sequence (X).

[0255] FIG. 8B: The synthetic construct is then extended by DNA polymerase to generate a hairpin structure having self-complementary sequence.

[0256] FIG. 8C: The construct is processed by restriction enzymes specific to R1 and R2 to generate a double-stranded DNA which is then inserted into an appropriate vector for expression in cells. The transcription cassette is designed such that a U6 promoter region flanks each side of the dsDNA which generates the separate sense and antisense strands of the siNA. Poly T termination sequences can be added to the constructs to generate U overhangs in the resulting transcript.

[0257] FIG. 9A-E is a diagrammatic representation of a method used to determine target sites for siNA mediated RNAi within a particular target nucleic acid sequence, such as messenger RNA.

[0258] FIG. 9A: A pool of siNA oligonucleotides are synthesized wherein the antisense region of the siNA constructs has complementarity to target sites across the target nucleic acid sequence, and wherein the sense region comprises sequence complementary to the antisense region of the siNA.

[0259] FIG. 9B&C: (FIG. 9B) The sequences are pooled and are inserted into vectors such that (FIG. 9C) transfection of a vector into cells results in the expression of the siNA.

[0260] FIG. 9D: Cells are sorted based on phenotypic change that is associated with modulation of the target nucleic acid sequence.

[0261] FIG. 9E: The siNA is isolated from the sorted cells and is sequenced to identify efficacious target sites within the target nucleic acid sequence.

[0262] FIG. 10 shows non-limiting examples of different stabilization chemistries (1-10) that can be used, for example, to stabilize the 3′-end of siNA sequences of the invention, including (1) [3-3′]-inverted deoxyribose; (2) deoxyribonucleotide; (3) [5′-3′]-3′-deoxyribonucleotide; (4) [5′-3′]-ribonucleotide; (5) [5′-3′]-3′-O-methyl ribonucleotide; (6) 3′-glyceryl; (7) [3′-5′]-3′-deoxyribonucleotide; (8) [3′-3′]-deoxyribonucleotide; (9) [5′-2′]-deoxyribonucleotide; and (10) [5-3′]-dideoxyribonucleotide. In addition to modified and unmodified backbone chemistries indicated in the figure, these chemistries can be combined with different backbone modifications as described herein, for example, backbone modifications having Formula I. In addition, the 2′-deoxy nucleotide shown 5′ to the terminal modifications shown can be another modified or unmodified nucleotide or non-nucleotide described herein, for example modifications having any of Formulae I-VII or any combination thereof.

[0263] FIG. 11 shows a non-limiting example of a strategy used to identify chemically modified siNA constructs of the invention that are nuclease resistance while preserving the ability to mediate RNAi activity. Chemical modifications are introduced into the siNA construct based on educated design parameters (e.g. introducing 2′-mofications, base modifications, backbone modifications, terminal cap modifications etc). The modified construct in tested in an appropriate system (e.g. human serum for nuclease resistance, shown, or an animal model for PK/delivery parameters). In parallel, the siNA construct is tested for RNAi activity, for example in a cell culture system such as a luciferase reporter assay). Lead siNA constructs are then identified which possess a particular characteristic while maintaining RNAi activity, and can be further modified and assayed once again. This same approach can be used to identify siNA-conjugate molecules with improved pharmacokinetic profiles, delivery, and RNAi activity.

[0264] FIG. 12 shows non-limiting examples of phosphorylated siNA molecules of the invention, including linear and duplex constructs and asymmetric derivatives thereof.

[0265] FIG. 13 shows non-limiting examples of chemically modified terminal phosphate groups of the invention.

[0266] FIG. 14A shows a non-limiting example of methodology used to design self complementary DFO constructs utilizing palidrome and/or repeat nucleic acid sequences that are identified in a target nucleic acid sequence. (i) A palindrome or repeat sequence is identified in a nucleic acid target sequence. (ii) A sequence is designed that is complementary to the target nucleic acid sequence and the palindrome sequence. (iii) An inverse repeat sequence of the non-palindrome/repeat portion of the complementary sequence is appended to the 3′-end of the complementary sequence to generate a self complementary DFO molecule comprising sequence complementary to the nucleic acid target. (iv) The DFO molecule can self-assemble to form a double stranded oligonucleotide. FIG. 14B shows a non-limiting representative example of a duplex forming oligonucleotide sequence. FIG. 14C shows a non-limiting example of the self assembly schematic of a representative duplex forming oligonucleotide sequence. FIG. 14D shows a non-limiting example of the self assembly schematic of a representative duplex forming oligonucleotide sequence followed by interaction with a target nucleic acid sequence resulting in modulation of gene expression.

[0267] FIG. 15 shows a non-limiting example of the design of self complementary DFO constructs utilizing palidrome and/or repeat nucleic acid sequences that are incorporated into the DFO constructs that have sequence complementary to any target nucleic acid sequence of interest. Incorporation of these palindrome/repeat sequences allow the design of DFO constructs that form duplexes in which each strand is capable of mediating modulation of target gene expression, for example by RNAi. First, the target sequence is identified. A complementary sequence is then generated in which nucleotide or non-nucleotide modifications (shown as X or Y) are introduced into the complementary sequence that generate an artificial palindrome (shown as XYXYXY in the Figure). An inverse repeat of the non-palindrome/repeat complementary sequence is appended to the 3′-end of the complementary sequence to generate a self complementary DFO comprising sequence complementary to the nucleic acid target. The DFO can self-assemble to form a double stranded oligonucleotide.

[0268] FIG. 16 shows non-limiting examples of multifunctional siNA molecules of the invention comprising two separate polynucleotide sequences that are each capable of mediating RNAi directed cleavage of differing target nucleic acid sequences. FIG. 16A shows a non-limiting example of a multifunctional siNA molecule having a first region that is complementary to a first target nucleic acid sequence (complementary region 1) and a second region that is complementary to a second target nucleic acid sequence (complementary region 2), wherein the first and second complementary regions are situated at the 3′-ends of each polynucleotide sequence in the multifunctional siNA. The dashed portions of each polynucleotide sequence of the multifunctional siNA construct have complementarity with regard to corresponding portions of the siNA duplex, but do not have complementarity to the target nucleic acid sequences. FIG. 16B shows a non-limiting example of a multifunctional siNA molecule having a first region that is complementary to a first target nucleic acid sequence (complementary region 1) and a second region that is complementary to a second target nucleic acid sequence (complementary region 2), wherein the first and second complementary regions are situated at the 5′-ends of each polynucleotide sequence in the multifunctional siNA. The dashed portions of each polynucleotide sequence of the multifunctional siNA construct have complementarity with regard to corresponding portions of the siNA duplex, but do not have complementarity to the target nucleic acid sequences.

[0269] FIG. 17 shows non-limiting examples of multifunctional siNA molecules of the invention comprising a single polynucleotide sequence comprising distinct regions that are each capable of mediating RNAi directed cleavage of differing target nucleic acid sequences. FIG. 17A shows a non-limiting example of a multifunctional siNA molecule having a first region that is complementary to a first target nucleic acid sequence (complementary region 1) and a second region that is complementary to a second target nucleic acid sequence (complementary region 2), wherein the second complementary region is situated at the 3′-end of the polynucleotide sequence in the multifunctional siNA. The dashed portions of each polynucleotide sequence of the multifunctional siNA construct have complementarity with regard to corresponding portions of the siNA duplex, but do not have complementarity to the target nucleic acid sequences. FIG. 17B shows a non-limiting example of a multifunctional siNA molecule having a first region that is complementary to a first target nucleic acid sequence (complementary region 1) and a second region that is complementary to a second target nucleic acid sequence (complementary region 2), wherein the first complementary region is situated at the 5′-end of the polynucleotide sequence in the multifunctional siNA. The dashed portions of each polynucleotide sequence of the multifunctional siNA construct have complementarity with regard to corresponding portions of the siNA duplex, but do not have complementarity to the target nucleic acid sequences. In one embodiment, these multifunctional siNA constructs are processed in vivo or in vitro to generate multifunctional siNA constructs as shown in FIG. 16.

[0270] FIG. 18 shows non-limiting examples of multifunctional siNA molecules of the invention comprising two separate polynucleotide sequences that are each capable of mediating RNAi directed cleavage of differing target nucleic acid sequences and wherein the multifunctional siNA construct further comprises a self complementary, palindrome, or repeat region, thus enabling shorter bifuctional siNA constructs that can mediate RNA interference against differing target nucleic acid sequences. FIG. 18A shows a non-limiting example of a multifunctional siNA molecule having a first region that is complementary to a first target nucleic acid sequence (complementary region 1) and a second region that is complementary to a second target nucleic acid sequence (complementary region 2), wherein the first and second complementary regions are situated at the 3′-ends of each polynucleotide sequence in the multifunctional siNA, and wherein the first and second complementary regions further comprise a self complementary, palindrome, or repeat region. The dashed portions of each polynucleotide sequence of the multifunctional siNA construct have complementarity with regard to corresponding portions of the siNA duplex, but do not have complementarity to the target nucleic acid sequences. FIG. 18B shows a non-limiting example of a multifunctional siNA molecule having a first region that is complementary to a first target nucleic acid sequence (complementary region 1) and a second region that is complementary to a second target nucleic acid sequence (complementary region 2), wherein the first and second complementary regions are situated at the 5′-ends of each polynucleotide sequence in the multifunctional siNA, and wherein the first and second complementary regions further comprise a self complementary, palindrome, or repeat region. The dashed portions of each polynucleotide sequence of the multifunctional siNA construct have complementarity with regard to corresponding portions of the siNA duplex, but do not have complementarity to the target nucleic acid sequences.

[0271] FIG. 19 shows non-limiting examples of multifunctional siNA molecules of the invention comprising a single polynucleotide sequence comprising distinct regions that are each capable of mediating RNAi directed cleavage of differing target nucleic acid sequences and wherein the multifunctional siNA construct further comprises a self complementary, palindrome, or repeat region, thus enabling shorter bifuctional siNA constructs that can mediate RNA interference against differing target nucleic acid sequences. FIG. 19A shows a non-limiting example of a multifunctional siNA molecule having a first region that is complementary to a first target nucleic acid sequence (complementary region 1) and a second region that is complementary to a second target nucleic acid sequence (complementary region 2), wherein the second complementary region is situated at the 3′-end of the polynucleotide sequence in the multifunctional siNA, and wherein the first and second complementary regions further comprise a self complementary, palindrome, or repeat region. The dashed portions of each polynucleotide sequence of the multifunctional siNA construct have complementarity with regard to corresponding portions of the siNA duplex, but do not have complementarity to the target nucleic acid sequences. FIG. 19B shows a non-limiting example of a multifunctional siNA molecule having a first region that is complementary to a first target nucleic acid sequence (complementary region 1) and a second region that is complementary to a second target nucleic acid sequence (complementary region 2), wherein the first complementary region is situated at the 5′-end of the polynucleotide sequence in the multifunctional siNA, and wherein the first and second complementary regions further comprise a self complementary, palindrome, or repeat region. The dashed portions of each polynucleotide sequence of the multifunctional siNA construct have complementarity with regard to corresponding portions of the siNA duplex, but do not have complementarity to the target nucleic acid sequences. In one embodiment, these multifunctional siNA constructs are processed in vivo or in vitro to generate multifunctional siNA constructs as shown in FIG. 18.

[0272] FIG. 20 shows a non-limiting example of how multifunctional siNA molecules of the invention can target two separate target nucleic acid molecules, such as separate RNA molecules encoding differing proteins, for example, a cytokine and its corresponding receptor, differing viral strains, a virus and a cellular protein involved in viral infection or replication, or differing proteins involved in a common or divergent biologic pathway that is implicated in the maintenance of progression of disease. Each strand of the multifunctional siNA construct comprises a region having complementarity to separate target nucleic acid molecules. The multifunctional siNA molecule is designed such that each strand of the siNA can be utilized by the RISC complex to initiate RNA interference mediated cleavage of its corresponding target. These design parameters can include destabilization of each end of the siNA construct (see for example Schwarz et al., 2003, Cell, 115, 199-208). Such destabilization can be accomplished for example by using guanosine-cytidine base pairs, alternate base pairs (e.g., wobbles), or destabilizing chemically modified nucleotides at terminal nucleotide positions as is known in the art.

[0273] FIG. 21 shows a non-limiting example of how multifunctional siNA molecules of the invention can target two separate target nucleic acid sequences within the same target nucleic acid molecule, such as alternate coding regions of a RNA, coding and non-coding regions of a RNA, or alternate splice variant regions of a RNA. Each strand of the multifunctional siNA construct comprises a region having complementarity to the separate regions of the target nucleic acid molecule. The multifunctional siNA molecule is designed such that each strand of the siNA can be utilized by the RISC complex to initiate RNA interference mediated cleavage of its corresponding target region. These design parameters can include destabilization of each end of the siNA construct (see for example Schwarz et al., 2003, Cell, 115, 199-208). Such destabilization can be accomplished for example by using guanosine-cytidine base pairs, alternate base pairs (e.g., wobbles), or destabilizing chemically modified nucleotides at terminal nucleotide positions as is known in the art.

[0274] FIG. 22 shows a non-limiting example of reduction of BACE mRNA levels in A549 cells after treatment with siNA molecules targeting BACE mRNA. A549 cells were transfected with 0.25 ug/well of lipid complexed with 25 nM siNA. A screen of siNA constructs comprising ribonucleotides and 3′-terminal dithymidine caps was compared to untreated cells, scrambled siNA control constructs (Scram 1 and Scram 2), and the cells transfected with lipid alone (transfection control). As shown in the Figure, all of the siNA constructs show significant reduction of BACE RNA expression.

[0275] FIG. 23 shows a non-limiting example of reduction of BACE mRNA levels in A549 cells (5,000 cells/well) 24 hours after treatment with siNA molecules targeting BACE mRNA. A549 cells were transfected with 0.25 ug/well of lipid complexed with 25 nM siNA. A lead siNA construct (31007/31083) chosen from the screen described in FIG. 22 was further modified using chemical modifications described in Table IV herein. Chemically modified constructs having Stab 4/5 chemistry (31378/31381) and Stab 7/11 chemistry (31384/31387) (solid bars; see Tables III and IV) were tested for efficacy compared to matched chemistry inverted controls (open bars; sequences shown in Table III). The original lead siNA construct (31007/31083) and the Stab 4/5 and Stab 7/11 constructs were compared to untreated cells, scrambled siNA control constructs (Scram1 and Scram2), and cells transfected with lipid alone (transfection control). As shown in the figure, the original lead construct and the Stab 4/5 and Stab 7/11 modified siNA constructs all show significant reduction of BACE RNA expression.

[0276] FIG. 24 shows a non-limiting example of reduction of APP mRNA in SK—N—SH cells mediated by chemically modified siNAs that target APP mRNA. SK—N—SH cells were transfected with 0.25 ug/well of lipid complexed with 25 nM siNA. Active siNA constructs comprising various stabilization chemistries (solid bars; see Tables III and IV) were compared to untreated cells, matched chemistry irrelevant siNA control constructs (IC1), and cells transfected with lipid alone (transfection control). As shown in the figure, the siNA constructs significantly reduce APP RNA expression.

[0277] FIG. 25 shows a non-limiting example of reduction of PSEN1 mRNA in SK—N—SH cells mediated by chemically modified siNAs that target PSEN1 mRNA. SK—N—SH cells were transfected with 0.25 ug/well of lipid complexed with 25 nM siNA. Active siNA constructs comprising various stabilization chemistries (solid bars; see Tables III and IV) were compared to untreated cells, matched chemistry irrelevant siNA control constructs (IC 1), and cells transfected with lipid alone (transfection control). As shown in the figure, the siNA constructs significantly reduce PSEN1 RNA expression.

[0278] FIG. 26 shows a non-limiting example of reduction of PSEN2 mRNA in SK—N—SH cells mediated by chemically modified siNAs that target PSEN2 mRNA. SK—N—SH cells were transfected with 0.25 ug/well of lipid complexed with 25 nM siNA. Active siNA constructs comprising various stabilization chemistries (solid bars; see Tables III and IV) were compared to untreated cells, matched chemistry irrelevant siNA control constructs (IC 1), and cells transfected with lipid alone (transfection control). As shown in the figure, the siNA constructs significantly reduce PSEN2 RNA expression.

### DETAILED DESCRIPTION OF THE INVENTION

### Mechanism of Action of Nucleic Acid Molecules of the Invention

[0279] The discussion that follows discusses the proposed mechanism of RNA interference mediated by short interfering RNA as is presently known, and is not meant to be limiting and is not an admission of prior art. Applicant demonstrates herein that chemically-modified short interfering nucleic acids possess similar or improved capacity to mediate RNAi as do siRNA molecules and are expected to possess improved stability and activity in vivo; therefore, this discussion is not meant to be limiting only to siRNA and can be applied to siNA as a whole. By “improved capacity to mediate RNAi” or “improved RNAi activity” is meant to include RNAi activity measured in vitro and/or in vivo where the RNAi activity is a reflection of both the ability of the siNA to mediate RNAi and the stability of the siNAs of the invention. In this invention, the product of these activities can be increased in vitro and/or in vivo compared to an all RNA siRNA or a siNA containing a plurality of ribonucleotides. In some cases, the activity or stability of the siNA molecule can be decreased (i.e., less than ten-fold), but the overall activity of the siNA molecule is enhanced in vitro and/or in vivo.

[0280] RNA interference refers to the process of sequence specific post-transcriptional gene silencing in animals mediated by short interfering RNAs (siRNAs) (Fire et al., 1998, Nature, 391, 806). The corresponding process in plants is commonly referred to as post-transcriptional gene silencing or RNA silencing and is also referred to as quelling in fungi. The process of post-transcriptional gene silencing is thought to be an evolutionarily-conserved cellular defense mechanism used to prevent the expression of foreign genes which is commonly shared by diverse flora and phyla (Fire et al., 1999, Trends Genet., 15, 358). Such protection from foreign gene expression may have evolved in response to the production of double-stranded RNAs (dsRNAs) derived from viral infection or the random integration of transposon elements into a host genome via a cellular response that specifically destroys homologous single-stranded RNA or viral genomic RNA. The presence of dsRNA in cells triggers the RNAi response though a mechanism that has yet to be fully characterized. This mechanism appears to be different from the interferon response that results from dsRNA-mediated activation of protein kinase PKR and 2′, 5′-oligoadenylate synthetase resulting in non-specific cleavage of mRNA by ribonuclease L.

[0281] The presence of long dsRNAs in cells stimulates the activity of a ribonuclease III enzyme referred to as Dicer. Dicer is involved in the processing of the dsRNA into short pieces of dsRNA known as short interfering RNAs (siRNAs) (Berstein et al., 2001, Nature, 409, 363). Short interfering RNAs derived from Dicer activity are typically about 21 to about 23 nucleotides in length and comprise about 19 base pair duplexes. Dicer has also been implicated in the excision of 21- and 22-nucleotide small temporal RNAs (stRNAs) from precursor RNA of conserved structure that are implicated in translational control (Hutvagner et al., 2001, Science, 293, 834). The RNAi response also features an endonuclease complex containing a siRNA, commonly referred to as an RNA-induced silencing complex (RISC), which mediates cleavage of single-stranded RNA having sequence homologous to the siRNA. Cleavage of the target RNA takes place in the middle of the region complementary to the guide sequence of the siRNA duplex (Elbashir et al., 2001, Genes Dev., 15, 188). In addition, RNA interference can also involve small RNA (e.g., micro-RNA or miRNA) mediated gene silencing, presumably though cellular mechanisms that regulate chromatin structure and thereby prevent transcription of target gene sequences (see for example Allshire, 2002, Science, 297, 1818-1819; Volpe et al., 2002, Science, 297, 1833-1837; Jenuwein, 2002, Science, 297, 2215-2218; and Hall et al., 2002, Science, 297, 2232-2237). As such, siNA molecules of the invention can be used to mediate gene silencing via interaction with RNA transcripts or alternately by interaction with particular gene sequences, wherein such interaction results in gene silencing either at the transcriptional level or post-transcriptional level.

[0282] RNAi has been studied in a variety of systems. Fire et al., 1998, Nature, 391, 806, were the first to observe RNAi in C. elegans. Wianny and Goetz, 1999, Nature Cell Biol, 2, 70, describe RNAi mediated by dsRNA in mouse embryos. Hammond et al., 2000, Nature, 404, 293, describe RNAi in Drosophila cells transfected with dsRNA. Elbashir et al., 2001, Nature, 411, 494, describe RNAi induced by introduction of duplexes of synthetic 21-nucleotide RNAs in cultured mammalian cells including human embryonic kidney and HeLa cells. Recent work in Drosophila embryonic lysates has revealed certain requirements for siRNA length, structure, chemical composition, and sequence that are essential to mediate efficient RNAi activity. These studies have shown that 21 nucleotide siRNA duplexes are most active when containing two 2-nucleotide 3′-terminal nucleotide overhangs. Furthermore, substitution of one or both siRNA strands with 2′-deoxy or 2′-O-methyl nucleotides abolishes RNAi activity, whereas substitution of 3′-terminal siRNA nucleotides with deoxy nucleotides was shown to be tolerated. Mismatch sequences in the center of the siRNA duplex were also shown to abolish RNAi activity. In addition, these studies also indicate that the position of the cleavage site in the target RNA is defined by the 5′-end of the siRNA guide sequence rather than the 3′-end (Elbashir et al., 2001, EMBO J., 20, 6877). Other studies have indicated that a 5′-phosphate on the target-complementary strand of a siRNA duplex is required for siRNA activity and that ATP is utilized to maintain the 5′-phosphate moiety on the siRNA (Nykanen et al., 2001, Cell, 107, 309); however, siRNA molecules lacking a 5′-phosphate are active when introduced exogenously, suggesting that 5′-phosphorylation of siRNA constructs may occur in vivo.

Synthesis of Nucleic Acid Molecules

[0283] Synthesis of nucleic acids greater than 100 nucleotides in length is difficult using automated methods, and the therapeutic cost of such molecules is prohibitive. In this invention, small nucleic acid motifs (“small” refers to nucleic acid motifs no more than 100 nucleotides in length, preferably no more than 80 nucleotides in length, and most preferably no more than 50 nucleotides in length; e.g., individual siNA oligonucleotide sequences or siNA sequences synthesized in tandem) are preferably used for exogenous delivery. The simple structure of these molecules increases the ability of the nucleic acid to invade targeted regions of protein and/or RNA structure. Exemplary molecules of the instant invention are chemically synthesized, and others can similarly be synthesized.

[0284] Oligonucleotides (e.g., certain modified oligonucleotides or portions of oligonucleotides lacking ribonucleotides) are synthesized using protocols known in the art, for example as described in Caruthers et al, 1992, Methods in Enzymology 211, 3-19, Thompson et al., International PCT Publication No. WO 99/54459, Wincott et al., 1995, Nucleic Acids Res. 23, 2677-2684, Wincott et al., 1997, Methods Mol. Bio., 74, 59, Brennan et al., 1998, Biotechnol Bioeng., 61, 33-45, and Brennan, U.S. Pat. No. 6,001,311. All of these references are incorporated herein by reference. The synthesis of oligonucleotides makes use of common nucleic acid protecting and coupling groups, such as dimethoxytrityl at the 5′-end, and phosphoramidites at the 3′-end. In a non-limiting example, small scale syntheses are conducted on a 394 Applied Biosystems, Inc. synthesizer using a 0.2 μmol scale protocol with a 2.5 min coupling step for 2′-O-methylated nucleotides and a 45 second coupling step for 2′-deoxy nucleotides or 2′-deoxy-2′-fluoro nucleotides. Table V outlines the amounts and the contact times of the reagents used in the synthesis cycle. Alternatively, syntheses at the 0.2 μmol scale can be performed on a 96-well plate synthesizer, such as the instrument produced by Protogene (Palo Alto, Calif.) with minimal modification to the cycle. A 33-fold excess (60 μL of 0.11 M=6.6 μmol) of 2′-O-methyl phosphoramidite and a 105-fold excess of S-ethyl tetrazole (60 μL of 0.25 M=15 μmol) can be used in each coupling cycle of 2′-O-methyl residues relative to polymer-bound 5′-hydroxyl. A 22-fold excess (40 μL of 0.11 M=4.4 μmol) of deoxy phosphoramidite and a 70-fold excess of S-ethyl tetrazole (40 μL of 0.25 M =10 μmol) can be used in each coupling cycle of deoxy residues relative to polymer-bound 5′-hydroxyl. Average coupling yields on the 394 Applied Biosystems, Inc. synthesizer, determined by colorimetric quantitation of the trityl fractions, are typically 97.5-99%. Other oligonucleotide synthesis reagents for the 394 Applied Biosystems, Inc. synthesizer include the following: detritylation solution is 3% TCA in methylene chloride (ABI); capping is performed with 16% N-methyl imidazole in THF (ABI) and 10% acetic anhydride/10% 2,6-lutidine in THF (ABI); and oxidation solution is 16.9 mM I₂, 49 mM pyridine, 9% water in THF (PerSeptive Biosystems, Inc.). Burdick & Jackson Synthesis Grade acetonitrile is used directly from the reagent bottle. S-Ethyltetrazole solution (0.25 M in acetonitrile) is made up from the solid obtained from American International Chemical, Inc. Alternately, for the introduction of phosphorothioate linkages, Beaucage reagent (3H-1,2-Benzodithiol-3-one 1,1-dioxide, 0.05 M in acetonitrile) is used.

[0285] Deprotection of the DNA-based oligonucleotides is performed as follows: the polymer-bound trityl-on oligoribonucleotide is transferred to a 4 mL glass screw top vial and suspended in a solution of 40% aqueous methylamine (1 mL) at 65° C. for 10 minutes. After cooling to −20° C., the supernatant is removed from the polymer support. The support is washed three times with 1.0 mL of EtOH:MeCN:H20/3:1:1, vortexed and the supernatant is then added to the first supernatant. The combined supernatants, containing the oligoribonucleotide, are dried to a white powder.

[0286] The method of synthesis used for RNA including certain siNA molecules of the invention follows the procedure as described in Usman et al., 1987, J. Am. Chem. Soc., 109, 7845; Scaringe et al., 1990, Nucleic Acids Res., 18, 5433; and Wincott et al., 1995, Nucleic Acids Res. 23, 2677-2684 Wincott et al., 1997, Methods Mol. Bio., 74, 59, and makes use of common nucleic acid protecting and coupling groups, such as dimethoxytrityl at the 5′-end, and phosphoramidites at the 3′-end. In a non-limiting example, small scale syntheses are conducted on a 394 Applied Biosystems, Inc. synthesizer using a 0.2 μmol scale protocol with a 7.5 min coupling step for alkylsilyl protected nucleotides and a 2.5 min coupling step for 2′-O-methylated nucleotides. Table V outlines the amounts and the contact times of the reagents used in the synthesis cycle. Alternatively, syntheses at the 0.2 μmol scale can be done on a 96-well plate synthesizer, such as the instrument produced by Protogene (Palo Alto, Calif.) with minimal modification to the cycle. A 33-fold excess (60 μL of 0.11 M =6.6 μmol) of 2′-O-methyl phosphoramidite and a 75-fold excess of S-ethyl tetrazole (60 μL of 0.25 M=15 μmol) can be used in each coupling cycle of 2′-O-methyl residues relative to polymer-bound 5′-hydroxyl. A 66-fold excess (120 μL of 0.11 M =13.2 μmol) of alkylsilyl (ribo) protected phosphoramidite and a 150-fold excess of S-ethyl tetrazole (120 μL of 0.25 M=30 μmol) can be used in each coupling cycle of ribo residues relative to polymer-bound 5′-hydroxyl. Average coupling yields on the 394 Applied Biosystems, Inc. synthesizer, determined by colorimetric quantitation of the trityl fractions, are typically 97.5-99%. Other oligonucleotide synthesis reagents for the 394 Applied Biosystems, Inc. synthesizer include the following: detritylation solution is 3% TCA in methylene chloride (ABI); capping is performed with 16% N-methyl imidazole in THF (ABI) and 10% acetic anhydride/10% 2,6-lutidine in THF (ABI); oxidation solution is 16.9 mM I₂, 49 mM pyridine, 9% water in THF (PerSeptive Biosystems, Inc.). Burdick & Jackson Synthesis Grade acetonitrile is used directly from the reagent bottle. S-Ethyltetrazole solution (0.25 M in acetonitrile) is made up from the solid obtained from American International Chemical, Inc. Alternately, for the introduction of phosphorothioate linkages, Beaucage reagent (3H-1,2-Benzodithiol-3-one 1,1-dioxide0.05 M in acetonitrile) is used.

[0287] Deprotection of the RNA is performed using either a two-pot or one-pot protocol. For the two-pot protocol, the polymer-bound trityl-on oligoribonucleotide is transferred to a 4 mL glass screw top vial and suspended in a solution of 40% aq. methylamine (1 mL) at 65° C. for 10 min. After cooling to −20° C., the supernatant is removed from the polymer support. The support is washed three times with 1.0 mL of EtOH:MeCN:H2O/3:1:1, vortexed and the supernatant is then added to the first supernatant. The combined supernatants, containing the oligoribonucleotide, are dried to a white powder. The base deprotected oligoribonucleotide is resuspended in anhydrous TEA/HF/NMP solution (300 μL of a solution of 1.5 mL N-methylpyrrolidinone, 750 μL TEA and 1 mL TEA.3HF to provide a 1.4 M HF concentration) and heated to 65° C. After 1.5 h, the oligomer is quenched with 1.5 M NH₄HCO₃.

[0288] Alternatively, for the one-pot protocol, the polymer-bound trityl-on oligoribonucleotide is transferred to a 4 mL glass screw top vial and suspended in a solution of 33% ethanolic methylamine/DMSO: 1/1 (0.8 mL) at 65° C. for 15 minutes. The vial is brought to room temperature TEA.3HF (0.1 mL) is added and the vial is heated at 65° C. for 15 minutes. The sample is cooled at −20° C. and then quenched with 1.5 M NH4HCO₃.

[0289] For purification of the trityl-on oligomers, the quenched NH₄HCO₃ solution is loaded onto a C-18 containing cartridge that had been prewashed with acetonitrile followed by 50 mM TEAA. After washing the loaded cartridge with water, the RNA is detritylated with 0.5% TFA for 13 minutes. The cartridge is then washed again with water, salt exchanged with 1 M NaCl and washed with water again. The oligonucleotide is then eluted with 30% acetonitrile.

[0290] The average stepwise coupling yields are typically >98% (Wincott et al., 1995 Nucleic Acids Res. 23, 2677-2684). Those of ordinary skill in the art will recognize that the scale of synthesis can be adapted to be larger or smaller than the example described above including but not limited to 96-well format.

[0291] Alternatively, the nucleic acid molecules of the present invention can be synthesized separately and joined together post-synthetically, for example, by ligation (Moore et al., 1992, Science 256, 9923; Draper et al., International PCT publication No. WO 93/23569; Shabarova et al., 1991, Nucleic Acids Research 19, 4247; Bellon et al., 1997, Nucleosides & Nucleotides, 16, 951; Bellon et al., 1997, Bioconjugate Chem. 8, 204), or by hybridization following synthesis and/or deprotection.

[0292] The siNA molecules of the invention can also be synthesized via a tandem synthesis methodology as described in Example 1 herein, wherein both siNA strands are synthesized as a single contiguous oligonucleotide fragment or strand separated by a cleavable linker which is subsequently cleaved to provide separate siNA fragments or strands that hybridize and permit purification of the siNA duplex. The linker can be a polynucleotide linker or a non-nucleotide linker. The tandem synthesis of siNA as described herein can be readily adapted to both multiwell/multiplate synthesis platforms such as 96 well or similarly larger multi-well platforms. The tandem synthesis of siNA as described herein can also be readily adapted to large scale synthesis platforms employing batch reactors, synthesis columns and the like.

[0293] A siNA molecule can also be assembled from two distinct nucleic acid strands or fragments wherein one fragment includes the sense region and the second fragment includes the antisense region of the RNA molecule.

[0294] The nucleic acid molecules of the present invention can be modified extensively to enhance stability by modification with nuclease resistant groups, for example, 2′-amino, 2′-C-allyl, 2′-fluoro, 2′-O-methyl, 2′-H (for a review see Usman and Cedergren, 1992, TIBS 17, 34; Usman et al., 1994, Nucleic Acids Symp. Ser. 31, 163). siNA constructs can be purified by gel electrophoresis using general methods or can be purified by high pressure liquid chromatography (HPLC; see Wincott et al., supra, the totality of which is hereby incorporated herein by reference) and re-suspended in water.

[0295] In another aspect of the invention, siNA molecules of the invention are expressed from transcription units inserted into DNA or RNA vectors. The recombinant vectors can be DNA plasmids or viral vectors. siNA expressing viral vectors can be constructed based on, but not limited to, adeno-associated virus, retrovirus, adenovirus, or alphavirus. The recombinant vectors capable of expressing the siNA molecules can be delivered as described herein, and persist in target cells. Alternatively, viral vectors can be used that provide for transient expression of siNA molecules.

### Optimizing Activity of the Nucleic Acid Molecule of the Invention

[0296] Chemically synthesizing nucleic acid molecules with modifications (base, sugar and/or phosphate) can prevent their degradation by serum ribonucleases, which can increase their potency (see e.g., Eckstein et al., International Publication No. WO 92/07065; Perrault et al., 1990 Nature 344, 565; Pieken et al., 1991, Science 253, 314; Usman and Cedergren, 1992, Trends in Biochem. Sci. 17, 334; Usman et al., International Publication No. WO 93/15187; and Rossi et al., International Publication No. WO 91/03162; Sproat, U.S. Pat. No. 5,334,711; Gold etal., U.S. Pat. No. 6,300,074; and Burgin et al., supra; all of which are incorporated by reference herein). All of the above references describe various chemical modifications that can be made to the base, phosphate and/or sugar moieties of the nucleic acid molecules described herein. Modifications that enhance their efficacy in cells, and removal of bases from nucleic acid molecules to shorten oligonucleotide synthesis times and reduce chemical requirements are desired.

[0297] There are several examples in the art describing sugar, base and phosphate modifications that can be introduced into nucleic acid molecules with significant enhancement in their nuclease stability and efficacy. For example, oligonucleotides are modified to enhance stability and/or enhance biological activity by modification with nuclease resistant groups, for example, 2′-amino, 2′-C-allyl, 2′-fluoro, 2′-O-methyl, 2′-O-allyl, 2′-H, nucleotide base modifications (for a review see Usman and Cedergren, 1992, TIBS. 17, 34; Usman et al., 1994, Nucleic Acids Symp. Ser. 31, 163; Burgin et al., 1996, Biochemistry, 35, 14090). Sugar modification of nucleic acid molecules have been extensively described in the art (see Eckstein et al, International Publication PCT No. WO 92/07065; Perrault et al. Nature, 1990, 344, 565-568; Pieken et al. Science, 1991, 253, 314-317; Usman and Cedergren, Trends in Biochem. Sci., 1992, 17, 334-339; Usman et al. International Publication PCT No. WO 93/15187; Sproat, U.S. Pat. No. 5,334,711 and Beigelman et al, 1995, J. Biol. Chem., 270, 25702; Beigelman et al., International PCT publication No. WO 97/26270; Beigelman et al., U.S. Pat. No. 5,716,824; Usman et al., U.S. Pat. No. 5,627,053; Woolf et al., International PCT Publication No. WO 98/13526; Thompson et al., U.S. Ser. No 60/082,404 which was filed on Apr. 20, 1998; Karpeisky et al., 1998, Tetrahedron Lett., 39, 1131; Earnshaw and Gait, 1998, Biopolymers (Nucleic Acid Sciences), 48, 39-55; Verma and Eckstein, 1998, Annu. Rev. Biochem., 67, 99-134; and Burlina et al., 1997, Bioorg. Med. Chem., 5, 1999-2010; all of the references are hereby incorporated in their totality by reference herein). Such publications describe general methods and strategies to determine the location of incorporation of sugar, base and/or phosphate modifications and the like into nucleic acid molecules without modulating catalysis, and are incorporated by reference herein. In view of such teachings, similar modifications can be used as described herein to modify the siNA nucleic acid molecules of the instant invention so long as the ability of siNA to promote RNAi is cells is not significantly inhibited.

[0298] While chemical modification of oligonucleotide internucleotide linkages with phosphorothioate, phosphorodithioate, and/or 5′-methylphosphonate linkages improves stability, excessive modifications can cause some toxicity or decreased activity. Therefore, when designing nucleic acid molecules, the amount of these internucleotide linkages should be minimized. The reduction in the concentration of these linkages should lower toxicity, resulting in increased efficacy and higher specificity of these molecules.

[0299] Short interfering nucleic acid (siNA) molecules having chemical modifications that maintain or enhance activity are provided. Such a nucleic acid is also generally more resistant to nucleases than an unmodified nucleic acid. Accordingly, the in vitro and/or in vivo activity should not be significantly lowered. In cases in which modulation is the goal, therapeutic nucleic acid molecules delivered exogenously should optimally be stable within cells until translation of the target RNA has been modulated long enough to reduce the levels of the undesirable protein. This period of time varies between hours to days depending upon the disease state. Improvements in the chemical synthesis of RNA and DNA (Wincott et al., 1995, Nucleic Acids Res. 23, 2677; Caruthers et al., 1992, Methods in Enzymology 211, 3-19 (incorporated by reference herein)) have expanded the ability to modify nucleic acid molecules by introducing nucleotide modifications to enhance their nuclease stability, as described above.

[0300] In one embodiment, nucleic acid molecules of the invention include one or more (e.g., about 1, 2, 3, 4, 5, 6, 7, 8, 9, 10, or more) G-clamp nucleotides. A G-clamp nucleotide is a modified cytosine analog wherein the modifications confer the ability to hydrogen bond both Watson-Crick and Hoogsteen faces of a complementary guanine within a duplex, see for example Lin and Matteucci, 1998, J. Am. Chem. Soc., 120, 8531-8532. A single G-clamp analog substitution within an oligonucleotide can result in substantially enhanced helical thermal stability and mismatch discrimination when hybridized to complementary oligonucleotides. The inclusion of such nucleotides in nucleic acid molecules of the invention results in both enhanced affinity and specificity to nucleic acid targets, complementary sequences, or template strands. In another embodiment, nucleic acid molecules of the invention include one or more (e.g., about 1, 2, 3, 4, 5, 6, 7, 8, 9, 10, or more) LNA “locked nucleic acid” nucleotides such as a 2′, 4′-C methylene bicyclo nucleotide (see for example Wengel et al., International PCT Publication No. WO 00/66604 and WO 99/14226).

[0301] In another embodiment, the invention features conjugates and/or complexes of siNA molecules of the invention. Such conjugates and/or complexes can be used to facilitate delivery of siNA molecules into a biological system, such as a cell. The conjugates and complexes provided by the instant invention can impart therapeutic activity by transferring therapeutic compounds across cellular membranes, altering the pharmacokinetics, and/or modulating the localization of nucleic acid molecules of the invention. The present invention encompasses the design and synthesis of novel conjugates and complexes for the delivery of molecules, including, but not limited to, small molecules, lipids, cholesterol, phospholipids, nucleosides, nucleotides, nucleic acids, antibodies, toxins, negatively charged polymers and other polymers, for example proteins, peptides, hormones, carbohydrates, polyethylene glycols, or polyamines, across cellular membranes. In general, the transporters described are designed to be used either individually or as part of a multi-component system, with or without degradable linkers. These compounds are expected to improve delivery and/or localization of nucleic acid molecules of the invention into a number of cell types originating from different tissues, in the presence or absence of serum (see Sullenger and Cech, U.S. Pat. No. 5,854,038). Conjugates of the molecules described herein can be attached to biologically active molecules via linkers that are biodegradable, such as biodegradable nucleic acid linker molecules.

[0302] The term “biodegradable linker” as used herein, refers to a nucleic acid or non-nucleic acid linker molecule that is designed as a biodegradable linker to connect one molecule to another molecule, for example, a biologically active molecule to a siNA molecule of the invention or the sense and antisense strands of a siNA molecule of the invention. The biodegradable linker is designed such that its stability can be modulated for a particular purpose, such as delivery to a particular tissue or cell type. The stability of a nucleic acid-based biodegradable linker molecule can be modulated by using various chemistries, for example combinations of ribonucleotides, deoxyribonucleotides, and chemically-modified nucleotides, such as 2′-O-methyl, 2′-fluoro, 2′-amino, 2′-O-amino, 2′-C-allyl, 2′-O-allyl, and other 2′-modified or base modified nucleotides. The biodegradable nucleic acid linker molecule can be a dimer, trimer, tetramer or longer nucleic acid molecule, for example, an oligonucleotide of about 2, 3, 4, 5, 6, 7, 8, 9, 10, 11, 12, 13, 14, 15, 16, 17, 18, 19, or 20 nucleotides in length, or can comprise a single nucleotide with a phosphorus-based linkage, for example, a phosphoramidate or phosphodiester linkage. The biodegradable nucleic acid linker molecule can also comprise nucleic acid backbone, nucleic acid sugar, or nucleic acid base modifications.

[0303] The term “biodegradable” as used herein, refers to degradation in a biological system, for example, enzymatic degradation or chemical degradation.

[0304] The term “biologically active molecule” as used herein refers to compounds or molecules that are capable of eliciting or modifying a biological response in a system. Non-limiting examples of biologically active siNA molecules either alone or in combination with other molecules contemplated by the instant invention include therapeutically active molecules such as antibodies, cholesterol, hormones, antivirals, peptides, proteins, chemotherapeutics, small molecules, vitamins, co-factors, nucleosides, nucleotides, oligonucleotides, enzymatic nucleic acids, antisense nucleic acids, triplex forming oligonucleotides, 2,5-A chimeras, siNA, dsRNA, allozymes, aptamers, decoys and analogs thereof. Biologically active molecules of the invention also include molecules capable of modulating the pharmacokinetics and/or pharmacodynamics of other biologically active molecules, for example, lipids and polymers such as polyamines, polyamides, polyethylene glycol and other polyethers.

[0305] The term “phospholipid” as used herein, refers to a hydrophobic molecule comprising at least one phosphorus group. For example, a phospholipid can comprise a phosphorus-containing group and saturated or unsaturated alkyl group, optionally substituted with OH, COOH, oxo, amine, or substituted or unsubstituted aryl groups.

[0306] Therapeutic nucleic acid molecules (e.g., siNA molecules) delivered exogenously optimally are stable within cells until reverse transcription of the RNA has been modulated long enough to reduce the levels of the RNA transcript. The nucleic acid molecules are resistant to nucleases in order to function as effective intracellular therapeutic agents. Improvements in the chemical synthesis of nucleic acid molecules described in the instant invention and in the art have expanded the ability to modify nucleic acid molecules by introducing nucleotide modifications to enhance their nuclease stability as described above.

[0307] In yet another embodiment, siNA molecules having chemical modifications that maintain or enhance enzymatic activity of proteins involved in RNAi are provided. Such nucleic acids are also generally more resistant to nucleases than unmodified nucleic acids. Thus, in vitro and/or in vivo the activity should not be significantly lowered.

[0308] Use of the nucleic acid-based molecules of the invention will lead to better treatments by affording the possibility of combination therapies (e.g., multiple siNA molecules targeted to different genes; nucleic acid molecules coupled with known small molecule modulators; or intermittent treatment with combinations of molecules, including different motifs and/or other chemical or biological molecules). The treatment of subjects with siNA molecules can also include combinations of different types of nucleic acid molecules, such as enzymatic nucleic acid molecules (ribozymes), allozymes, antisense, 2,5-A oligoadenylate, decoys, and aptamers.

[0309] In another aspect a siNA molecule of the invention comprises one or more 5′ and/or a 3′-cap structure, for example, on only the sense siNA strand, the antisense siNA strand, or both siNA strands.

[0310] By “cap structure” is meant chemical modifications, which have been incorporated at either terminus of the oligonucleotide (see, for example, Adamic et al., U.S. Pat. No. 5,998,203, incorporated by reference herein). These terminal modifications protect the nucleic acid molecule from exonuclease degradation, and may help in delivery and/or localization within a cell. The cap may be present at the 5′-terminus (5′-cap) or at the 3′-terminal (3′-cap) or may be present on both termini. In non-limiting examples, the 5′-cap includes, but is not limited to, glyceryl, inverted deoxy abasic residue (moiety); 4′,5′-methylene nucleotide; 1-(beta-D-erythrofuranosyl) nucleotide, 4′-thio nucleotide; carbocyclic nucleotide; 1,5-anhydrohexitol nucleotide; L-nucleotides; alpha-nucleotides; modified base nucleotide; phosphorodithioate linkage; threo-pentofuranosyl nucleotide; acyclic 3′,4′-seco nucleotide; acyclic 3,4-dihydroxybutyl nucleotide; acyclic 3,5-dihydroxypentyl nucleotide, 3′-3′-inverted nucleotide moiety; 3′-3′-inverted abasic moiety; 3′-2′-inverted nucleotide moiety; 3′-2′-inverted abasic moiety; 1,4-butanediol phosphate; 3′-phosphoramidate; hexylphosphate; aminohexyl phosphate; 3′-phosphate; 3′-phosphorothioate; phosphorodithioate; or bridging or non-bridging methylphosphonate moiety.

[0311] Non-limiting examples of the 3′-cap include, but are not limited to, glyceryl, inverted deoxy abasic residue (moiety), 4′,5′-methylene nucleotide; 1-(beta-D-erythrofuranosyl)nucleotide; 4′-thio nucleotide, carbocyclic nucleotide; 5′-amino-alkyl phosphate; 1,3-diamino-2-propyl phosphate; 3-aminopropyl phosphate; 6-aminohexyl phosphate; 1,2-aminododecyl phosphate; hydroxypropyl phosphate; 1,5-anhydrohexitol nucleotide; L-nucleotide; alpha-nucleotide; modified base nucleotide; phosphorodithioate; threo-pentofuranosyl nucleotide; acyclic 3′,4′-seco nucleotide; 3,4-dihydroxybutyl nucleotide; 3,5-dihydroxypentyl nucleotide, 5′-5′-inverted nucleotide moiety; 5′-5′-inverted abasic moiety; 5′-phosphoramidate; 5′-phosphorothioate; 1,4-butanediol phosphate; 5′-amino; bridging and/or non-bridging 5′-phosphoramidate, phosphorothioate and/or phosphorodithioate, bridging or non bridging methylphosphonate and 5′-mercapto moieties (for more details see Beaucage and Iyer, 1993, Tetrahedron 49, 1925; incorporated by reference herein).

[0312] By the term “non-nucleotide” is meant any group or compound which can be incorporated into a nucleic acid chain in the place of one or more nucleotide units, including either sugar and/or phosphate substitutions, and allows the remaining bases to exhibit their enzymatic activity. The group or compound is abasic in that it does not contain a commonly recognized nucleotide base, such as adenosine, guanine, cytosine, uracil or thymine and therefore lacks a base at the 1′-position.

[0313] An “alkyl” group refers to a saturated aliphatic hydrocarbon, including straight-chain, branched-chain, and cyclic alkyl groups. Preferably, the alkyl group has 1 to 12 carbons. More preferably, it is a lower alkyl of from 1 to 7 carbons, more preferably 1 to 4 carbons. The alkyl group can be substituted or unsubstituted. When substituted the substituted group(s) is preferably, hydroxyl, cyano, alkoxy, ═O, ═S, NO₂ or N(CH₃)₂, amino, or SH. The term also includes alkenyl groups that are unsaturated hydrocarbon groups containing at least one carbon-carbon double bond, including straight-chain, branched-chain, and cyclic groups. Preferably, the alkenyl group has 1 to 12 carbons. More preferably, it is a lower alkenyl of from 1 to 7 carbons, more preferably 1 to 4 carbons. The alkenyl group may be substituted or unsubstituted. When substituted the substituted group(s) is preferably, hydroxyl, cyano, alkoxy, ═O, ═S, NO₂, halogen, N(CH₃)₂, amino, or SH. The term “alkyl” also includes alkynyl groups that have an unsaturated hydrocarbon group containing at least one carbon-carbon triple bond, including straight-chain, branched-chain, and cyclic groups. Preferably, the alkynyl group has 1 to 12 carbons. More preferably, it is a lower alkynyl of from 1 to 7 carbons, more preferably 1 to 4 carbons. The alkynyl group may be substituted or unsubstituted. When substituted the substituted group(s) is preferably, hydroxyl, cyano, alkoxy, ═O, ═S, NO₂ or N(CH₃)₂, amino or SH.

[0314] Such alkyl groups can also include aryl, alkylaryl, carbocyclic aryl, heterocyclic aryl, amide and ester groups. An “aryl” group refers to an aromatic group that has at least one ring having a conjugated pi electron system and includes carbocyclic aryl, heterocyclic aryl and biaryl groups, all of which may be optionally substituted. The preferred substituent(s) of aryl groups are halogen, trihalomethyl, hydroxyl, SH, OH, cyano, alkoxy, alkyl, alkenyl, alkynyl, and amino groups. An “alkylaryl” group refers to an alkyl group (as described above) covalently joined to an aryl group (as described above). Carbocyclic aryl groups are groups wherein the ring atoms on the aromatic ring are all carbon atoms. The carbon atoms are optionally substituted. Heterocyclic aryl groups are groups having from 1 to 3 heteroatoms as ring atoms in the aromatic ring and the remainder of the ring atoms are carbon atoms. Suitable heteroatoms include oxygen, sulfur, and nitrogen, and include furanyl, thienyl, pyridyl, pyrrolyl, N-lower alkyl pyrrolo, pyrimidyl, pyrazinyl, imidazolyl and the like, all optionally substituted. An “amide” refers to an —C(O)—NH—R, where R is either alkyl, aryl, alkylaryl or hydrogen. An “ester” refers to an —C(O)—OR′, where R is either alkyl, aryl, alkylaryl or hydrogen.

[0315] By “nucleotide” as used herein is as recognized in the art to include natural bases (standard), and modified bases well known in the art. Such bases are generally located at the 1′ position of a nucleotide sugar moiety. Nucleotides generally comprise a base, sugar and a phosphate group. The nucleotides can be unmodified or modified at the sugar, phosphate and/or base moiety, (also referred to interchangeably as nucleotide analogs, modified nucleotides, non-natural nucleotides, non-standard nucleotides and other; see, for example, Usman and McSwiggen, supra; Eckstein et al., International PCT Publication No. WO 92/07065; Usman et al., International PCT Publication No. WO 93/15187; Uhlman & Peyman, supra, all are hereby incorporated by reference herein). There are several examples of modified nucleic acid bases known in the art as summarized by Limbach et al., 1994, Nucleic Acids Res. 22, 2183. Some of the non-limiting examples of base modifications that can be introduced into nucleic acid molecules include, inosine, purine, pyridin-4-one, pyridin-2-one, phenyl, pseudouracil, 2, 4, 6-trimethoxy benzene, 3-methyl uracil, dihydrouridine, naphthyl, aminophenyl, 5-alkylcytidines (e.g., 5-methylcytidine), 5-alkyluridines (e.g., ribothymidine), 5-halouridine (e.g., 5-bromouridine) or 6-azapyrimidines or 6-alkylpyrimidines (e.g. 6-methyluridine), propyne, and others (Burgin et al., 1996, Biochemistry, 35, 14090; Uhlman & Peyman, supra). By “modified bases” in this aspect is meant nucleotide bases other than adenine, guanine, cytosine and uracil at 1′ position or their equivalents.

[0316] In one embodiment, the invention features modified siNA molecules, with phosphate backbone modifications comprising one or more phosphorothioate, phosphorodithioate, methylphosphonate, phosphotriester, morpholino, amidate carbamate, carboxymethyl, acetamidate, polyamide, sulfonate, sulfonamide, sulfamate, formacetal, thioformacetal, and/or alkylsilyl, substitutions. For a review of oligonucleotide backbone modifications, see Hunziker and Leumann, 1995, Nucleic Acid Analogues: Synthesis and Properties, in Modern Synthetic Methods, VCH, 331-417, and Mesmaeker et al., 1994, Novel Backbone Replacements for Oligonucleotides, in Carbohydrate Modifications in Antisense Research, ACS, 24-39.

[0317] By “abasic” is meant sugar moieties lacking a base or having other chemical groups in place of a base at the 1′ position, see for example Adamic et al., U.S. Pat. No. 5,998,203.

[0318] By “unmodified nucleoside” is meant one of the bases adenine, cytosine, guanine, thymine, or uracil joined to the 1′ carbon of β-D-ribo-furanose.

[0319] By “modified nucleoside” is meant any nucleotide base which contains a modification in the chemical structure of an unmodified nucleotide base, sugar and/or phosphate. Non-limiting examples of modified nucleotides are shown by Formulae I-VII and/or other modifications described herein.

[0320] In connection with 2′-modified nucleotides as described for the present invention, by “amino” is meant 2′-NH₂ or 2′-O- NH₂, which can be modified or unmodified. Such modified groups are described, for example, in Eckstein et al., U.S. Pat. No. 5,672,695 and Matulic-Adamic et al., U.S. Pat. No. 6,248,878, which are both incorporated by reference in their entireties.

[0321] Various modifications to nucleic acid siNA structure can be made to enhance the utility of these molecules. Such modifications will enhance shelf-life, half-life in vitro, stability, and ease of introduction of such oligonucleotides to the target site, e.g., to enhance penetration of cellular membranes, and confer the ability to recognize and bind to targeted cells.

Administration of Nucleic Acid Molecules

[0322] A siNA molecule of the invention can be adapted for use to prevent or treat a variety of neurodegenerative diseases, including Alzheimer's disease, dementia, stroke (CVA), or any other trait, disease or condition that is related to or will respond to the levels of BACE in a cell or tissue, alone or in combination with other therapies.

[0323] For example, a siNA molecule can comprise a delivery vehicle, including liposomes, for administration to a subject, carriers and diluents and their salts, and/or can be present in pharmaceutically acceptable formulations. Methods for the delivery of nucleic acid molecules are described in Akhtar et al., 1992, Trends Cell Bio., 2, 139; Delivery Strategies for Antisense Oligonucleotide Therapeutics, ed. Akhtar, 1995, Maurer et al., 1999, Mol. Membr. Biol., 16, 129-140; Hofland and Huang, 1999, Handb. Exp. Pharmacol, 137, 165-192; and Lee et al., 2000, ACS Symp. Ser., 752, 184-192, all of which are incorporated herein by reference. Beigelman et al., U.S. Pat. No. 6,395,713 and Sullivan et al., PCT WO 94/02595 further describe the general methods for delivery of nucleic acid molecules. These protocols can be utilized for the delivery of virtually any nucleic acid molecule. Nucleic acid molecules can be administered to cells by a variety of methods known to those of skill in the art, including, but not restricted to, encapsulation in liposomes, by iontophoresis, or by incorporation into other vehicles, such as biodegradable polymers, hydrogels, cyclodextrins (see for example Gonzalez et al., 1999, Bioconjugate Chem., 10, 1068-1074; Wang et al., International PCT publication Nos. WO 03/47518 and WO 03/46185), poly(lactic-co-glycolic)acid (PLGA) and PLCA microspheres (see for example U.S. Pat. No. 6,447,796 and US Patent Application Publication No. US 2002130430), biodegradable nanocapsules, and bioadhesive microspheres, or by proteinaceous vectors (O'Hare and Normand, International PCT Publication No. WO 00/53722). In another embodiment, the nucleic acid molecules of the invention can also be formulated or complexed with polyethyleneimine and derivatives thereof, such as polyethyleneimine-polyethyleneglycol-N-acetylgalactosamine (PEI-PEG-GAL) or polyethyleneimine-polyethyleneglycol-tri-N-acetylgalactosamine (PEI-PEG-triGAL) derivatives.

[0324] In one embodiment, a siNA molecule of the invention is complexed with membrane disruptive agents such as those described in U.S. Patent Application Publication No. 20010007666, incorporated by reference herein in its entirety including the drawings. In another embodiment, the membrane disruptive agent or agents and the siNA molecule are also complexed with a cationic lipid or helper lipid molecule, such as those lipids described in U.S. Pat. No. 6,235,310, incorporated by reference herein in its entirety including the drawings.

[0325] In one embodiment, a siNA molecule of the invention is complexed with delivery systems as described in U.S. patent Application Publication No. 2003077829 and International PCT Publication Nos. WO 00/03683 and WO 02/087541, all incorporated by reference herein in their entirety including the drawings.

[0326] In one embodiment, siNA molecules of the invention are formulated or complexed with polyethylenimine (e.g., linear or branched PEI) and/or polyethylenimine derivatives, including for example grafted PEIs such as galactose PEI, cholesterol PEI, antibody derivatized PEI, and polyethylene glycol PEI (PEG-PEI) derivatives thereof (see for example Ogris et al., 2001, AAPA PharmSci, 3, 1-11; Furgeson et al., 2003, Bioconjugate Chem., 14, 840-847; Kunath et al., 2002, Phramaceutical Research, 19, 810-817; Choi et al., 2001, Bull. Korean Chem. Soc., 22, 46-52; Bettinger et al., 1999, Bioconjugate Chem., 10, 558-561; Peterson et al., 2002, Bioconjugate Chem., 13, 845-854; Erbacher et al., 1999, Journal of Gene Medicine Preprint, 1, 1-18; Godbey et al., 1999., PNAS USA, 96, 5177-5181; Godbey et al., 1999, Journal of Controlled Release, 60, 149-160; Diebold et al., 1999, Journal of Biological Chemistry, 274, 19087-19094; Thomas and Klibanov, 2002, PNAS USA, 99, 14640-14645; and Sagara, U.S. Pat. No. 6,586,524, incorporated by reference herein.

[0327] In one embodiment, a siNA molecule of the invention comprises a bioconjugate, for example a nucleic acid conjugate as described in Vargeese et al., U.S. Ser. No. 10/427,160, filed Apr. 30, 2003; U.S. Pat. No. 6,528,631; U.S. Pat. No. 6,335,434; U.S. Pat. No. 6, 235,886; U.S. Pat. No. 6,153,737; U.S. Pat. No. 5,214,136; U.S. Pat. No. 5,138,045, all incorporated by reference herein.

[0328] Thus, the invention features a pharmaceutical composition comprising one or more nucleic acid(s) of the invention in an acceptable carrier, such as a stabilizer, buffer, and the like. The polynucleotides of the invention can be administered (e.g., RNA, DNA or protein) and introduced to a subject by any standard means, with or without stabilizers, buffers, and the like, to form a pharmaceutical composition. When it is desired to use a liposome delivery mechanism, standard protocols for formation of liposomes can be followed. The compositions of the present invention can also be formulated and used as creams, gels, sprays, oils and other suitable compositions for topical, dermal, or transdermal administration as is known in the art.

[0329] The present invention also includes pharmaceutically acceptable formulations of the compounds described. These formulations include salts of the above compounds, e.g., acid addition salts, for example, salts of hydrochloric, hydrobromic, acetic acid, and benzene sulfonic acid.

[0330] A pharmacological composition or formulation refers to a composition or formulation in a form suitable for administration, e.g., systemic or local administration, into a cell or subject, including for example a human. Suitable forms, in part, depend upon the use or the route of entry, for example oral, transdermal, or by injection. Such forms should not prevent the composition or formulation from reaching a target cell (i.e., a cell to which the negatively charged nucleic acid is desirable for delivery). For example, pharmacological compositions injected into the blood stream should be soluble. Other factors are known in the art, and include considerations such as toxicity and forms that prevent the composition or formulation from exerting its effect.

[0331] In one embodiment, the invention features the use of methods to deliver the nucleic acid molecules of the instant invention to the central nervous system and/or peripheral nervous system. Experiments have demonstrated the efficient in vivo uptake of nucleic acids by neurons. As an example of local administration of nucleic acids to nerve cells, Sommer et al., 1998, Antisense Nuc. Acid Drug Dev., 8, 75, describe a study in which a 15mer phosphorothioate antisense nucleic acid molecule to c-fos is administered to rats via microinjection into the brain. Antisense molecules labeled with tetramethylrhodamine-isothiocyanate (TRITC) or fluorescein isothiocyanate (FITC) were taken up by exclusively by neurons thirty minutes post-injection. A diffuse cytoplasmic staining and nuclear staining was observed in these cells. As an example of systemic administration of nucleic acid to nerve cells, Epa et al., 2000, Antisense Nuc. Acid Drug Dev., 10, 469, describe an in vivo mouse study in which beta-cyclodextrin-adamantane-oligonucleotide conjugates were used to target the p75 neurotrophin receptor in neuronally differentiated PC12 cells. Following a two week course of IP administration, pronounced uptake of p75 neurotrophin receptor antisense was observed in dorsal root ganglion (DRG) cells. In addition, a marked and consistent down-regulation of p75 was observed in DRG neurons. Additional approaches to the targeting of nucleic acid to neurons are described in Broaddus et al., 1998, J. Neurosurg., 88(4), 734; Karle et al., 1997, Eur. J. Pharmocol., 340(2/3), 153; Bannai et al., 1998, Brain Research, 784(1,2), 304; Rajakumar et al., 1997, Synapse, 26(3), 199; Wu-pong et al., 1999, BioPharm, 12(1), 32; Bannai et al., 1998, Brain Res. Protoc., 3(1), 83; Simantov et al., 1996, Neuroscience, 74(1), 39. Nucleic acid molecules of the invention are therefore amenable to delivery to and uptake by cells that express repeat expansion allelic variants for modulation of RE gene expression. The delivery of nucleic acid molecules of the invention, targeting RE is provided by a variety of different strategies. Traditional approaches to CNS delivery that can be used include, but are not limited to, intrathecal and intracerebroventricular administration, implantation of catheters and pumps, direct injection or perfusion at the site of injury or lesion, injection into the brain arterial system, or by chemical or osmotic opening of the blood-brain barrier. Other approaches can include the use of various transport and carrier systems, for example though the use of conjugates and biodegradable polymers. Furthermore, gene therapy approaches, for example as described in Kaplitt et al., U.S. Pat. No. 6,180,613 and Davidson, WO 04/013280, can be used to express nucleic acid molecules in the CNS.

[0332] In one embodiment, nucleic acid molecules of the invention are administered to the central nervous system (CNS) or peripheral nervous system (PNS). Experiments have demonstrated the efficient in vivo uptake of nucleic acids by neurons. As an example of local administration of nucleic acids to nerve cells, Sommer et al., 1998, Antisense Nuc. Acid Drug Dev., 8, 75, describe a study in which a 15mer phosphorothioate antisense nucleic acid molecule to c-fos is administered to rats via microinjection into the brain. Antisense molecules labeled with tetramethylrhodamine-isothiocyanate (TRITC) or fluorescein isothiocyanate (FITC) were taken up by exclusively by neurons thirty minutes post-injection. A diffuse cytoplasmic staining and nuclear staining was observed in these cells. As an example of systemic administration of nucleic acid to nerve cells, Epa et al., 2000, Antisense Nuc. Acid Drug Dev., 10, 469, describe an in vivo mouse study in which beta-cyclodextrin-adamantane-oligonucleotide conjugates were used to target the p75 neurotrophin receptor in neuronally differentiated PC12 cells. Following a two week course of IP administration, pronounced uptake of p75 neurotrophin receptor antisense was observed in dorsal root ganglion (DRG) cells. In addition, a marked and consistent down-regulation of p75 was observed in DRG neurons. Additional approaches to the targeting of nucleic acid to neurons are described in Broaddus et al., 1998, J. Neurosurg., 88(4), 734; Karle et al, 1997, Eur. J. Pharmocol., 340(2/3), 153; Bannai et al., 1998, Brain Research, 784(1,2), 304; Rajakumar et al., 1997, Synapse, 26(3), 199; Wu-pong et al., 1999, BioPharm, 12(1), 32; Bannai et al., 1998, Brain Res. Protoc., 3(1), 83; Simantov et al., 1996, Neuroscience, 74(1), 39. Nucleic acid molecules of the invention are therefore amenable to delivery to and uptake by cells in the CNS and/or PNS.

[0333] The delivery of nucleic acid molecules of the invention to the CNS is provided by a variety of different strategies. Traditional approaches to CNS delivery that can be used include, but are not limited to, intrathecal and intracerebroventricular administration, implantation of catheters and pumps, direct injection or perfusion at the site of injury or lesion, injection into the brain arterial system, or by chemical or osmotic opening of the blood-brain barrier. Other approaches can include the use of various transport and carrier systems, for example though the use of conjugates and biodegradable polymers. Furthermore, gene therapy approaches, for example as described in Kaplitt et al., U.S. Pat. No, 6,180,613 and Davidson, WO 04/013280, can be used to express nucleic acid molecules in the CNS.

[0334] In one embodiment, dermal delivery systems of the invention include, for example, aqueous and nonaqueous gels, creams, multiple emulsions, microemulsions, liposomes, ointments, aqueous and nonaqueous solutions, lotions, aerosols, hydrocarbon bases and powders, and can contain excipients such as solubilizers, permeation enhancers (e.g., fatty acids, fatty acid esters, fatty alcohols and amino acids), and hydrophilic polymers (e.g., polycarbophil and polyvinylpyrolidone). In one embodiment, the pharmaceutically acceptable carrier is a liposome or a transdermal enhancer. Examples of liposomes which can be used in this invention include the following: (1) CellFectin, 1: 1.5 (M/M) liposome formulation of the cationic lipid N,NI,NII,NIII-tetramethyl-N,NI,NIII,NIII-tetrapalmit-y-spermine and dioleoyl phosphatidylethanolamine (DOPE) (GIBCO BRL); (2) Cytofectin GSV, 2:1 (M/M) liposome formulation of a cationic lipid and DOPE (Glen Research); (3) DOTAP (N-[1-(2,3-dioleoyloxy)-N,N,N-tri-methyl-ammoniummethylsulfate) (Boehringer Manheim); and (4) Lipofectamine, 3:1 (M/M) liposome formulation of the polycationic lipid DOSPA and the neutral lipid DOPE (GIBCO BRL).

[0335] In one embodiment, siNA molecules of the invention are administered to a subject by systemic administration in a pharmaceutically acceptable composition or formulation. By “systemic administration” is meant in vivo systemic absorption or accumulation of drugs in the blood stream followed by distribution throughout the entire body. Administration routes that lead to systemic absorption include, without limitation: intravenous, subcutaneous, intraperitoneal, inhalation, oral, intrapulmonary and intramuscular. Each of these administration routes exposes the siNA molecules of the invention to an accessible diseased tissue. The rate of entry of a drug into the circulation has been shown to be a function of molecular weight or size. The use of a liposome or other drug carrier comprising the compounds of the instant invention can potentially localize the drug, for example, in certain tissue types, such as the tissues of the reticular endothelial system (RES). A liposome formulation that can facilitate the association of drug with the surface of cells, such as, lymphocytes and macrophages is also useful. This approach can provide enhanced delivery of the drug to target cells by taking advantage of the specificity of macrophage and lymphocyte immune recognition of abnormal cells.

[0336] In one embodiment, siNA molecules of the invention are formulated or complexed with polyethylenimine (e.g., linear or branched PEI) and/or polyethylenimine derivatives, including for example grafted PEIs such as galactose PEI, cholesterol PEI, antibody derivatized PEI, and polyethylene glycol PEI (PEG-PEI) derivatives thereof (see for example Ogris et al., 2001, AAPA PharmSci, 3, 1-11; Furgeson et al., 2003, Bioconjugate Chem., 14, 840-847; Kunath et al., 2002, Phramaceutical Research, 19, 810-817; Choi et al., 2001, Bull. Korean Chem. Soc., 22, 46-52; Bettinger et al., 1999, Bioconjugate Chem., 10, 558-561; Peterson et al., 2002, Bioconjugate Chem., 13, 845-854; Erbacher et al., 1999, Journal of Gene Medicine Preprint, 1, 1-18; Godbey et al., 1999, PNAS USA, 96, 5177-5181; Godbey et al., 1999, Journal of Controlled Release, 60, 149-160; Diebold et al., 1999, Journal of Biological Chemistry, 274, 19087-19094; Thomas and Klibanov, 2002, PNAS USA, 99, 14640-14645; and Sagara, U.S. Pat. No. 6,586,524, incorporated by reference herein.

[0337] By “pharmaceutically acceptable formulation” or “pharmaceutically acceptable composition” is meant a composition or formulation that allows for the effective distribution of the nucleic acid molecules of the instant invention in the physical location most suitable for their desired activity. Non-limiting examples of agents suitable for formulation with the nucleic acid molecules of the instant invention include: P-glycoprotein inhibitors (such as Pluronic P85),; biodegradable polymers, such as poly (DL-lactide-coglycolide) microspheres for sustained release delivery (Emerich, DF et al, 1999, Cell Transplant, 8, 47-58); and loaded nanoparticles, such as those made of polybutylcyanoacrylate. Other non-limiting examples of delivery strategies for the nucleic acid molecules of the instant invention include material described in Boado et al., 1998, J. Pharm. Sci., 87, 1308-1315; Tyler et al., 1999, FEBS Lett., 421, 280-284; Pardridge et al., 1995, PNAS USA., 92, 5592-5596; Boado, 1995, Adv. Drug Delivery Rev., 15, 73-107; Aldrian-Herrada et al., 1998, Nucleic Acids Res., 26, 4910-4916; and Tyler et al., 1999, PNAS USA., 96, 7053-7058.

[0338] The invention also features the use of the composition comprising surface-modified liposomes containing poly (ethylene glycol) lipids (PEG-modified, or long-circulating liposomes or stealth liposomes). These formulations offer a method for increasing the accumulation of drugs in target tissues. This class of drug carriers resists opsonization and elimination by the mononuclear phagocytic system (MPS or RES), thereby enabling longer blood circulation times and enhanced tissue exposure for the encapsulated drug (Lasic et al. Chem. Rev. 1995, 95, 2601-2627; Ishiwata et al., Chem. Pharm. Bull. 1995, 43, 1005-1011). Such liposomes have been shown to accumulate selectively in tumors, presumably by extravasation and capture in the neovascularized target tissues (Lasic et al., Science 1995, 267, 1275-1276; Oku et al, 1995, Biochim. Biophys. Acta, 1238, 86-90). The long-circulating liposomes enhance the pharmacokinetics and pharmacodynamics of DNA and RNA, particularly compared to conventional cationic liposomes which are known to accumulate in tissues of the MPS (Liu et al., J. Biol. Chem. 1995, 42, 24864-24870; Choi et al., International PCT Publication No. WO 96/10391; Ansell et al., International PCT Publication No. WO 96/10390; Holland et al., International PCT Publication No. WO 96/10392). Long-circulating liposomes are also likely to protect drugs from nuclease degradation to a greater extent compared to cationic liposomes, based on their ability to avoid accumulation in metabolically aggressive MPS tissues such as the liver and spleen.

[0339] The present invention also includes compositions prepared for storage or administration that include a pharmaceutically effective amount of the desired compounds in a pharmaceutically acceptable carrier or diluent. Acceptable carriers or diluents for therapeutic use are well known in the pharmaceutical art, and are described, for example, in Remington's Pharmaceutical Sciences, Mack Publishing Co. (A. R. Gennaro edit. 1985), hereby incorporated by reference herein. For example, preservatives, stabilizers, dyes and flavoring agents can be provided. These include sodium benzoate, sorbic acid and esters of p-hydroxybenzoic acid. In addition, antioxidants and suspending agents can be used.

[0340] A pharmaceutically effective dose is that dose required to prevent, inhibit the occurrence, or treat (alleviate a symptom to some extent, preferably all of the symptoms) of a disease state. The pharmaceutically effective dose depends on the type of disease, the composition used, the route of administration, the type of mammal being treated, the physical characteristics of the specific mammal under consideration, concurrent medication, and other factors that those skilled in the medical arts will recognize. Generally, an amount between 0.1 mg/kg and 100 mg/kg body weight/day of active ingredients is administered dependent upon potency of the negatively charged polymer.

[0341] The nucleic acid molecules of the invention and formulations thereof can be administered orally, topically, parenterally, by inhalation or spray, or rectally in dosage unit formulations containing conventional non-toxic pharmaceutically acceptable carriers, adjuvants and/or vehicles. The term parenteral as used herein includes percutaneous, subcutaneous, intravascular (e.g., intravenous), intramuscular, or intrathecal injection or infusion techniques and the like. In addition, there is provided a pharmaceutical formulation comprising a nucleic acid molecule of the invention and a pharmaceutically acceptable carrier. One or more nucleic acid molecules of the invention can be present in association with one or more non-toxic pharmaceutically acceptable carriers and/or diluents and/or adjuvants, and if desired other active ingredients. The pharmaceutical compositions containing nucleic acid molecules of the invention can be in a form suitable for oral use, for example, as tablets, troches, lozenges, aqueous or oily suspensions, dispersible powders or granules, emulsion, hard or soft capsules, or syrups or elixirs.

[0342] Compositions intended for oral use can be prepared according to any method known to the art for the manufacture of pharmaceutical compositions and such compositions can contain one or more such sweetening agents, flavoring agents, coloring agents or preservative agents in order to provide pharmaceutically elegant and palatable preparations. Tablets contain the active ingredient in admixture with non-toxic pharmaceutically acceptable excipients that are suitable for the manufacture of tablets. These excipients can be, for example, inert diluents; such as calcium carbonate, sodium carbonate, lactose, calcium phosphate or sodium phosphate; granulating and disintegrating agents, for example, corn starch, or alginic acid; binding agents, for example starch, gelatin or acacia; and lubricating agents, for example magnesium stearate, stearic acid or talc. The tablets can be uncoated or they can be coated by known techniques. In some cases such coatings can be prepared by known techniques to delay disintegration and absorption in the gastrointestinal tract and thereby provide a sustained action over a longer period. For example, a time delay material such as glyceryl monosterate or glyceryl distearate can be employed.

[0343] Formulations for oral use can also be presented as hard gelatin capsules wherein the active ingredient is mixed with an inert solid diluent, for example, calcium carbonate, calcium phosphate or kaolin, or as soft gelatin capsules wherein the active ingredient is mixed with water or an oil medium, for example peanut oil, liquid paraffin or olive oil.

[0344] Aqueous suspensions contain the active materials in a mixture with excipients suitable for the manufacture of aqueous suspensions. Such excipients are suspending agents, for example sodium carboxymethylcellulose, methylcellulose, hydropropyl-methylcellulose, sodium alginate, polyvinylpyrrolidone, gum tragacanth and gum acacia; dispersing or wetting agents can be a naturally-occurring phosphatide, for example, lecithin, or condensation products of an alkylene oxide with fatty acids, for example polyoxyethylene stearate, or condensation products of ethylene oxide with long chain aliphatic alcohols, for example heptadecaethyleneoxycetanol, or condensation products of ethylene oxide with partial esters derived from fatty acids and a hexitol such as polyoxyethylene sorbitol monooleate, or condensation products of ethylene oxide with partial esters derived from fatty acids and hexitol anhydrides, for example polyethylene sorbitan monooleate. The aqueous suspensions can also contain one or more preservatives, for example ethyl, or n-propyl p-hydroxybenzoate, one or more coloring agents, one or more flavoring agents, and one or more sweetening agents, such as sucrose or saccharin.

[0345] Oily suspensions can be formulated by suspending the active ingredients in a vegetable oil, for example arachis oil, olive oil, sesame oil or coconut oil, or in a mineral oil such as liquid paraffin. The oily suspensions can contain a thickening agent, for example beeswax, hard paraffin or cetyl alcohol. Sweetening agents and flavoring agents can be added to provide palatable oral preparations. These compositions can be preserved by the addition of an anti-oxidant such as ascorbic acid

[0346] Dispersible powders and granules suitable for preparation of an aqueous suspension by the addition of water provide the active ingredient in admixture with a dispersing or wetting agent, suspending agent and one or more preservatives. Suitable dispersing or wetting agents or suspending agents are exemplified by those already mentioned above. Additional excipients, for example sweetening, flavoring and coloring agents, can also be present.

[0347] Pharmaceutical compositions of the invention can also be in the form of oil-in-water emulsions. The oily phase can be a vegetable oil or a mineral oil or mixtures of these. Suitable emulsifying agents can be naturally-occurring gums, for example gum acacia or gum tragacanth, naturally-occurring phosphatides, for example soy bean, lecithin, and esters or partial esters derived from fatty acids and hexitol, anhydrides, for example sorbitan monooleate, and condensation products of the said partial esters with ethylene oxide, for example polyoxyethylene sorbitan monooleate. The emulsions can also contain sweetening and flavoring agents.

[0348] Syrups and elixirs can be formulated with sweetening agents, for example glycerol, propylene glycol, sorbitol, glucose or sucrose. Such formulations can also contain a demulcent, a preservative and flavoring and coloring agents. The pharmaceutical compositions can be in the form of a sterile injectable aqueous or oleaginous suspension. This suspension can be formulated according to the known art using those suitable dispersing or wetting agents and suspending agents that have been mentioned above. The sterile injectable preparation can also be a sterile injectable solution or suspension in a non-toxic parentally acceptable diluent or solvent, for example as a solution in 1,3-butanediol. Among the acceptable vehicles and solvents that can be employed are water, Ringer's solution and isotonic sodium chloride solution. In addition, sterile, fixed oils are conventionally employed as a solvent or suspending medium. For this purpose, any bland fixed oil can be employed including synthetic mono-or diglycerides. In addition, fatty acids such as oleic acid find use in the preparation of injectables.

[0349] The nucleic acid molecules of the invention can also be administered in the form of suppositories, e.g., for rectal administration of the drug. These compositions can be prepared by mixing the drug with a suitable non-irritating excipient that is solid at ordinary temperatures but liquid at the rectal temperature and will therefore melt in the rectum to release the drug. Such materials include cocoa butter and polyethylene glycols.

[0350] Nucleic acid molecules of the invention can be administered parenterally in a sterile medium. The drug, depending on the vehicle and concentration used, can either be suspended or dissolved in the vehicle. Advantageously, adjuvants such as local anesthetics, preservatives and buffering agents can be dissolved in the vehicle.

[0351] Dosage levels of the order of from about 0. 1 mg to about 140 mg per kilogram of body weight per day are useful in the treatment of the above-indicated conditions (about 0.5 mg to about 7 g per subject per day). The amount of active ingredient that can be combined with the carrier materials to produce a single dosage form varies depending upon the host treated and the particular mode of administration. Dosage unit forms generally contain between from about 1 mg to about 500 mg of an active ingredient.

[0352] It is understood that the specific dose level for any particular subject depends upon a variety of factors including the activity of the specific compound employed, the age, body weight, general health, sex, diet, time of administration, route of administration, and rate of excretion, drug combination and the severity of the particular disease undergoing therapy.

[0353] For administration to non-human animals, the composition can also be added to the animal feed or drinking water. It can be convenient to formulate the animal feed and drinking water compositions so that the animal takes in a therapeutically appropriate quantity of the composition along with its diet. It can also be convenient to present the composition as a premix for addition to the feed or drinking water.

[0354] The nucleic acid molecules of the present invention can also be administered to a subject in combination with other therapeutic compounds to increase the overall therapeutic effect. The use of multiple compounds to treat an indication can increase the beneficial effects while reducing the presence of side effects.

[0355] Alternatively, certain siNA molecules of the instant invention can be expressed within cells from eukaryotic promoters (e.g., Izant and Weintraub, 1985, Science, 229, 345; McGarry and Lindquist, 1986, Proc. Natl. Acad. Sci., USA 83, 399; Scanlon et al., 1991, Proc. Natl. Acad. Sci. USA, 88, 10591-5; Kashani-Sabet et al., 1992, Antisense Res. Dev., 2, 3-15; Dropulic et al, 1992, J. Virol., 66, 1432-41; Weerasinghe et al., 1991, J. Virol., 65, 5531-4; Ojwang et al., 1992, Proc. Natl. Acad. Sci. USA, 89, 10802-6; Chen et al., 1992, Nucleic Acids Res., 20, 4581-9; Sarver et al., 1990 Science, 247, 1222-1225; Thompson et al., 1995, Nucleic Acids Res., 23, 2259; Good et al., 1997, Gene Therapy, 4, 45. Those skilled in the art realize that any nucleic acid can be expressed in eukaryotic cells from the appropriate DNA/RNA vector. The activity of such nucleic acids can be augmented by their release from the primary transcript by a enzymatic nucleic acid (Draper et al., PCT WO 93/23569, and Sullivan et al., PCT WO 94/02595; Ohkawa et al., 1992, Nucleic Acids Symp. Ser., 27, 15-6; Taira et al., 1991, Nucleic Acids Res., 19, 5125-30; Ventura et al., 1993, Nucleic Acids Res., 21, 3249-55; Chowrira et al., 1994, J. Biol. Chem., 269, 25856.

[0356] In another aspect of the invention, RNA molecules of the present invention can be expressed from transcription units (see for example Couture et al., 1996, TIG., 12, 510) inserted into DNA or RNA vectors. The recombinant vectors can be DNA plasmids or viral vectors. siNA expressing viral vectors can be constructed based on, but not limited to, adeno-associated virus, retrovirus, adenovirus, or alphavirus. In another embodiment, pol III based constructs are used to express nucleic acid molecules of the invention (see for example Thompson, U.S. Pat. Nos. 5,902,880 and 6,146,886). The recombinant vectors capable of expressing the siNA molecules can be delivered as described above, and persist in target cells. Alternatively, viral vectors can be used that provide for transient expression of nucleic acid molecules. Such vectors can be repeatedly administered as necessary. Once expressed, the siNA molecule interacts with the target mRNA and generates an RNAi response. Delivery of siNA molecule expressing vectors can be systemic, such as by intravenous or intramuscular administration, by administration to target cells ex-planted from a subject followed by reintroduction into the subject, or by any other means that would allow for introduction into the desired target cell (for a review see Couture et al., 1996, TIG., 12, 510).

[0357] In one aspect the invention features an expression vector comprising a nucleic acid sequence encoding at least one siNA molecule of the instant invention. The expression vector can encode one or both strands of a siNA duplex, or a single self-complementary strand that self hybridizes into a siNA duplex. The nucleic acid sequences encoding the siNA molecules of the instant invention can be operably linked in a manner that allows expression of the siNA molecule (see for example Paul et al., 2002, Nature Biotechnology, 19, 505; Miyagishi and Taira, 2002, Nature Biotechnology, 9, 497; Lee et al., 2002, Nature Biotechnology, 19, 500; and Novina et al., 2002, Nature Medicine, advance online publication doi: 10.1038/nm725).

[0358] In another aspect, the invention features an expression vector comprising: a) a transcription initiation region (e.g., eukaryotic pol I, II or III initiation region); b) a transcription termination region (e.g., eukaryotic pol I, II or III termination region); and c) a nucleic acid sequence encoding at least one of the siNA molecules of the instant invention, wherein said sequence is operably linked to said initiation region and said termination region in a manner that allows expression and/or delivery of the siNA molecule. The vector can optionally include an open reading frame (ORF) for a protein operably linked on the 5′ side or the 3′-side of the sequence encoding the siNA of the invention; and/or an intron (intervening sequences).

[0359] Transcription of the siNA molecule sequences can be driven from a promoter for eukaryotic RNA polymerase I (pol I), RNA polymerase II (pol II), or RNA polymerase III (pol III). Transcripts from pol II or pol III promoters are expressed at high levels in all cells; the levels of a given pol II promoter in a given cell type depends on the nature of the gene regulatory sequences (enhancers, silencers, etc.) present nearby. Prokaryotic RNA polymerase promoters are also used, providing that the prokaryotic RNA polymerase enzyme is expressed in the appropriate cells (Elroy-Stein and Moss, 1990, Proc. Natl. Acad. Sci. USA, 87, 6743-7; Gao and Huang 1993, Nucleic Acids Res., 21, 2867-72; Lieber et al., 1993, Methods Enzymol., 217, 47-66; Zhou et al., 1990, Mol Cell Biol., 10, 4529-37). Several investigators have demonstrated that nucleic acid molecules expressed from such promoters can function in mammalian cells (e.g. Kashani-Sabet et al., 1992, Antisense Res. Dev., 2, 3-15; Ojwang et al., 1992, Proc. Natl. Acad. Sci. USA, 89, 10802-6; Chen et al., 1992, Nucleic Acids Res., 20, 4581-9; Yu et al., 1993, Proc. Natl. Acad. Sci. USA, 90, 6340-4; L'Huillier et al., 1992, EMBO J., 11, 4411-8; Lisziewicz et al., 1993, Proc. Natl. Acad. Sci. U.S.A, 90, 8000-4; Thompson et al., 1995, Nucleic Acids Res., 23, 2259; Sullenger & Cech, 1993, Science, 262, 1566). More specifically, transcription units such as the ones derived from genes encoding U6 small nuclear (snRNA), transfer RNA (tRNA) and adenovirus VA RNA are useful in generating high concentrations of desired RNA molecules such as siNA in cells (Thompson et al., supra; Couture and Stinchcomb, 1996, supra; Noonberg et al., 1994, Nucleic Acid Res., 22, 2830; Noonberg et al., U.S. Pat. No. 5,624,803; Good et al., 1997, Gene Ther., 4, 45; Beigelman et al., International PCT Publication No. WO 96/18736. The above siNA transcription units can be incorporated into a variety of vectors for introduction into mammalian cells, including but not restricted to, plasmid DNA vectors, viral DNA vectors (such as adenovirus or adeno-associated virus vectors), or viral RNA vectors (such as retroviral or alphavirus vectors) (for a review see Couture and Stinchcomb, 1996, supra).

[0360] In another aspect the invention features an expression vector comprising a nucleic acid sequence encoding at least one of the siNA molecules of the invention in a manner that allows expression of that siNA molecule. The expression vector comprises in one embodiment; a) a transcription initiation region; b) a transcription termination region; and c) a nucleic acid sequence encoding at least one strand of the siNA molecule, wherein the sequence is operably linked to the initiation region and the termination region in a manner that allows expression and/or delivery of the siNA molecule.

[0361] In another embodiment the expression vector comprises: a) a transcription initiation region; b) a transcription termination region; c) an open reading frame; and d) a nucleic acid sequence encoding at least one strand of a siNA molecule, wherein the sequence is operably linked to the 3′-end of the open reading frame and wherein the sequence is operably linked to the initiation region, the open reading frame and the termination region in a manner that allows expression and/or delivery of the siNA molecule. In yet another embodiment, the expression vector comprises: a) a transcription initiation region; b) a transcription termination region; c) an intron; and d) a nucleic acid sequence encoding at least one siNA molecule, wherein the sequence is operably linked to the initiation region, the intron and the termination region in a manner which allows expression and/or delivery of the nucleic acid molecule.

[0362] In another embodiment, the expression vector comprises: a) a transcription initiation region; b) a transcription termination region; c) an intron; d) an open reading frame; and e) a nucleic acid sequence encoding at least one strand of a siNA molecule, wherein the sequence is operably linked to the 3′-end of the open reading frame and wherein the sequence is operably linked to the initiation region, the intron, the open reading frame and the termination region in a manner which allows expression and/or delivery of the siNA molecule.

BACE, APP, PIN-1, and PS Biology and Biochemistry

[0363] Alzheimer's disease is characterized by the progressive formation of insoluble plaques and vascular deposits in the brain consisting of the 4 kD amyloid β peptide (Aβ). These plaques are characterized by dystrophic neurites that show profound synaptic loss, neurofibrillary tangle formation, and gliosis. Aβ arises from the proteolytic cleavage of the large type I transmembrane protein, β-amyloid precursor protein (APP) (Kang et al., 1987, Nature, 325, 733). Processing of APP to generate Aβ requires two sites of cleavage by a β-secretase and a γ-secretase. β-secretase cleavage of APP results in the cytoplasmic release of a 100 kD soluble amino-terminal fragment, APPsβ, leaving behind a 12 kD transmembrane carboxy-terminal fragment, C99. Alternately, APP can be cleaved by a α-secretase to generate cytoplasmic APPsα and transmembrane C83 fragments. Both remaining transmembrane fragments, C99 and C83, can be further cleaved by a γ-secretase, leading to the release and secretion of Alzheimer's related Aβ and a non-pathogenic peptide, p3, respectively (Vassar et al., 1999, Science, 286, 735-741). Early onset familial Alzheimer's disease is characterized by mutant APP protein with a Met to Leu substitution at position P1, characterized as the “Swedish” familial mutation (Mullan et al., 1992, Nature Genet., 1, 345). This APP mutation is characterized by a dramatic enhancement in β-secretase cleavage (Citron et al., 1992, Nature, 360, 672).

[0364] The identification of β-secretase and γ-secretase constituents involved in the release of β-amyloid protein is of primary importance in the development of treatment strategies for Alzheimer's disease. Characterization of α-secretase is also important in this regard since α-secretase cleavage may compete with β-secretase cleavage resulting in changes in the relative amounts of non-pathogenic and pathogenic protein production. Involvement of the two metalloproteases, ADAM 10 and TACE, has been demonstrated in α-cleavage of AAP (Buxbaum et al., 1999, J. Biol. Chem., 273, 27765, and Lammich et al., 1999, Proc. Natl. Acad. Sci. U.S.A., 96, 3922). Studies of γ-secretase activity have demonstrated presenilin dependence (De Stooper et al., 1998, Nature, 391, 387, and De Stooper et al., 1999, Nature, 398, 518), and as such, presenilins have been proposed as γ-secretase even though presenilin does not present proteolytic activity (Wolfe et al., 1999, Nature, 398, 513).

[0365] Studies have shown β-secretase cleavage of AAP by the transmembrane aspartic protease beta site APP cleaving enzyme, BACE (Vassar et al., supra). While other potential candidates for β-secretase have been proposed (for review see Evin et al., 1999, Proc. Natl. Acad. Sci. U.S.A., 96, 3922), none have demonstrated the full range of characteristics expected from this enzyme. Studies have shown that BACE expression and localization are as expected for β-secretase, that BACE overexpression in cells results in increased β-secretase cleavage of APP and Swedish APP, that isolated BACE demonstrates site specific proteolytic activity on APP derived peptide substrates, and that antisense mediated endogenous BACE inhibition results in dramatically reduced β-secretase activity (Vassar et al., supra).

[0366] Current treatment strategies for Alzheimer's disease rely on either the prevention or the alleviation of symptoms and/or the slowing down of disease progression. Two drugs approved in the treatment of Alzheimer's, donepezil (Aricept®) and tacrine (Cognex®), both cholinomimetics, attempt to slow the loss of cognitive ability by increasing the amount of acetylcholine available to the brain. Antioxidant therapy through the use of antioxidant compounds such as alpha-tocopherol (vitamin E), melatonin, and selegeline (Eldepryl®) attempt to slow disease progression by minimizing free radical damage. Estrogen replacement therapy is thought to incur a possible preventative benefit in the development of Alzheimer's disease based on limited data. The use of anti-inflammatory drugs may be associated with a reduced risk of Alzheimer's as well. Calcium channel blockers such as Nimodipine® are considered to have a potential benefit in treating Alzheimer's disease due to protection of nerve cells from calcium overload, thereby prolonging nerve cell survival. Nootropic compounds, such as acetyl-L-camitine (Alcar®) and insulin, have been proposed to have some benefit in treating Alzheimer's due to enhancement of cognitive and memory function based on cellular metabolism.

[0367] Whereby the above treatment strategies can all improve quality of life in Alzheimer's patients, there exists an unmet need in the comprehensive treatment and prevention of this disease. As such, there exists the need for therapeutics effective in reversing the physiological changes associated with Alzheimer's disease, specifically, therapeutics that can eliminate and/or reverse the deposition of amyloid β peptide. The use of compounds,such as small nucleic acid molecules (e.g., short interfering nucleic acid (siNA), short interfering RNA (siRNA), double-stranded RNA (dsRNA), micro-RNA (miRNA), and short hairpin RNA (shRNA) molecules capable of mediating RNA interference (RNAi)), to modulate the expression of proteases that are instrumental in the release of amyloid β peptide, namely β-secretase (BACE), γ-secretase (presenilin), and the amyloid precursor protein (APP), is of therapeutic significance.

### EXAMPLES

[0368] The following are non-limiting examples showing the selection, isolation, synthesis and activity of nucleic acids of the instant invention.

### Example 1

### Tandem Synthesis of siNA Constructs

[0369] Exemplary siNA molecules of the invention are synthesized in tandem using a cleavable linker, for example, a succinyl-based linker. Tandem synthesis as described herein is followed by a one-step purification process that provides RNAi molecules in high yield. This approach is highly amenable to siNA synthesis in support of high throughput RNAi screening, and can be readily adapted to multi-column or multi-well synthesis platforms.

[0370] After completing a tandem synthesis of a siNA oligo and its complement in which the 5′-terminal dimethoxytrityl (5′-O-DMT) group remains intact (trityl on synthesis), the oligonucleotides are deprotected as described above. Following deprotection, the siNA sequence strands are allowed to spontaneously hybridize. This hybridization yields a duplex in which one strand has retained the 5′-O-DMT group while the complementary strand comprises a terminal 5′-hydroxyl. The newly formed duplex behaves as a single molecule during routine solid-phase extraction purification (Trityl-On purification) even though only one molecule has a dimethoxytrityl group. Because the strands form a stable duplex, this dimethoxytrityl group (or an equivalent group, such as other trityl groups or other hydrophobic moieties) is all that is required to purify the pair of oligos, for example, by using a C18 cartridge.

[0371] Standard phosphoramidite synthesis chemistry is used up to the point of introducing a tandem linker, such as an inverted deoxy abasic succinate or glyceryl succinate linker (see FIG. 1) or an equivalent cleavable linker. A non-limiting example of linker coupling conditions that can be used includes a hindered base such as diisopropylethylamine (DIPA) and/or DMAP in the presence of an activator reagent such as Bromotripyrrolidinophosphoniumhexaflurorophosphate (PyBrOP). After the linker is coupled, standard synthesis chemistry is utilized to complete synthesis of the second sequence leaving the terminal the 5′-O-DMT intact. Following synthesis, the resulting oligonucleotide is deprotected according to the procedures described herein and quenched with a suitable buffer, for example with 5OmM NaOAc or 1.5M NH₄H₂CO₃.

[0372] Purification of the siNA duplex can be readily accomplished using solid phase extraction, for example, using a Waters C18 SepPak 1 g cartridge conditioned with 1 column volume (CV) of acetonitrile, 2 CV H2O, and 2 CV 50 mM NaOAc. The sample is loaded and then washed with 1 CV H2O or 50 mM NaOAc. Failure sequences are eluted with 1 CV 14% ACN (Aqueous with 50 mM NaOAc and 50 mM NaCl). The column is then washed, for example with 1 CV H2O followed by on-column detritylation, for example by passing 1 CV of 1% aqueous trifluoroacetic acid (TFA) over the column, then adding a second CV of 1% aqueous TFA to the column and allowing to stand for approximately 10 minutes. The remaining TFA solution is removed and the column washed with H2O followed by 1 CV IM NaCl and additional H2O. The siNA duplex product is then eluted, for example, using 1 CV 20% aqueous CAN.

[0373] FIG. 2 provides an example of MALDI-TOF mass spectrometry analysis of a purified siNA construct in which each peak corresponds to the calculated mass of an individual siNA strand of the siNA duplex. The same purified siNA provides three peaks when analyzed by capillary gel electrophoresis (CGE), one peak presumably corresponding to the duplex siNA, and two peaks presumably corresponding to the separate siNA sequence strands. Ion exchange HPLC analysis of the same siNA contract only shows a single peak. Testing of the purified siNA construct using a luciferase reporter assay described below demonstrated the same RNAi activity compared to siNA constructs generated from separately synthesized oligonucleotide sequence strands.

### Example 2

### Identification of Potential siNA Target Sites in Any RNA Sequence

[0374] The sequence of an RNA target of interest, such as a viral or human mRNA transcript, is screened for target sites, for example by using a computer folding algorithm. In a non-limiting example, the sequence of a gene or RNA gene transcript derived from a database, such as Genbank, is used to generate siNA targets having complementarity to the target. Such sequences can be obtained from a database, or can be determined experimentally as known in the art. Target sites that are known, for example, those target sites determined to be effective target sites based on studies with other nucleic acid molecules, for example ribozymes or antisense, or those targets known to be associated with a disease or condition such as those sites containing mutations or deletions, can be used to design siNA molecules targeting those sites. Various parameters can be used to determine which sites are the most suitable target sites within the target RNA sequence. These parameters include but are not limited to secondary or tertiary RNA structure, the nucleotide base composition of the target sequence, the degree of homology between various regions of the target sequence, or the relative position of the target sequence within the RNA transcript. Based on these determinations, any number of target sites within the RNA transcript can be chosen to screen siNA molecules for efficacy, for example by using in vitro RNA cleavage assays, cell culture, or animal models. In a non-limiting example, anywhere from 1 to 1000 target sites are chosen within the transcript based on the size of the siNA construct to be used. High throughput screening assays can be developed for screening siNA molecules using methods known in the art, such as with multi-well or multi-plate assays to determine efficient reduction in target gene expression.

### Example 3

### Selection of siNA Molecule Target Sites in a RNA

[0375] The following non-limiting steps can be used to carry out the selection of siNAs targeting a given gene sequence or transcript.
[0376] 1. The target sequence is parsed in silico into a list of all fragments or subsequences of a particular length, for example 23 nucleotide fragments, contained within the target sequence. This step is typically carried out using a custom Perl script, but commercial sequence analysis programs such as Oligo, MacVector, or the GCG Wisconsin Package can be employed as well.
[0377] 2. In some instances the siNAs correspond to more than one target sequence; such would be the case for example in targeting different transcripts of the same gene, targeting different transcripts of more than one gene, or for targeting both the human gene and an animal homolog. In this case, a subsequence list of a particular length is generated for each of the targets, and then the lists are compared to find matching sequences in each list. The subsequences are then ranked according to the number of target sequences that contain the given subsequence; the goal is to find subsequences that are present in most or all of the target sequences. Alternately, the ranking can identify subsequences that are unique to a target sequence, such as a mutant target sequence. Such an approach would enable the use of siNA to target specifically the mutant sequence and not effect the expression of the normal sequence.
[0378] 3. In some instances the siNA subsequences are absent in one or more sequences while present in the desired target sequence; such would be the case if the siNA targets a gene with a paralogous family member that is to remain untargeted. As in case 2 above, a subsequence list of a particular length is generated for each of the targets, and then the lists are compared to find sequences that are present in the target gene but are absent in the untargeted paralog.
[0379] 4. The ranked siNA subsequences can be further analyzed and ranked according to GC content. A preference can be given to sites containing 30-70% GC, with a further preference to sites containing 40-60% GC.
[0380] 5. The ranked siNA subsequences can be further analyzed and ranked according to self-folding and internal hairpins. Weaker internal folds are preferred; strong hairpin structures are to be avoided.
[0381] 6. The ranked siNA subsequences can be further analyzed and ranked according to whether they have runs of GGG or CCC in the sequence. GGG (or even more Gs) in either strand can make oligonucleotide synthesis problematic and can potentially interfere with RNAi activity, so it is avoided whenever better sequences are available. CCC is searched in the target strand because that will place GGG in the antisense strand.
[0382] 7. The ranked siNA subsequences can be further analyzed and ranked according to whether they have the dinucleotide UU (uridine dinucleotide) on the 3′-end of the sequence, and/or AA on the 5′-end of the sequence (to yield 3′ UU on the antisense sequence). These sequences allow one to design siNA molecules with terminal TT thymidine dinucleotides.
[0383] 8. Four or five target sites are chosen from the ranked list of subsequences as described above. For example, in subsequences having 23 nucleotides, the right 21 nucleotides of each chosen 23-mer subsequence are then designed and synthesized for the upper (sense) strand of the siNA duplex, while the reverse complement of the left 21 nucleotides of each chosen 23-mer subsequence are then designed and synthesized for the lower (antisense) strand of the siNA duplex (see Tables II and III). If terminal TT residues are desired for the sequence (as described in paragraph 7), then the two 3′ terminal nucleotides of both the sense and antisense strands are replaced by TT prior to synthesizing the oligos.
[0384] 9. The siNA molecules are screened in an in vitro, cell culture or animal model system to identify the most active siNA molecule or the most preferred target site within the target RNA sequence.
[0385] 10. Other design considerations can be used when selecting target nucleic acid sequences, see, for example, Reynolds et al., 2004, Nature Biotechnology Advanced Online Publication, 1 Feb. 2004, doi:10.1038/nbt936 and Ui-Tei et al., 2004, Nucleic Acids Research, 32, doi: 10.1093/nar/gkh247.

[0386] In an alternate approach, a pool of siNA constructs specific to a BACE target sequence is used to screen for target sites in cells expressing BACE RNA, such as cultured A549 cells, 7PA2 cells, Chinese hamster ovary (CHO) cells, or APPsw (Swedish type amyloid precursor protein expressing) cells. The general strategy used in this approach is shown in FIG. 9. A non-limiting example of such is a pool comprising sequences having any of SEQ ID NOS 1-1900. Cells expressing BACE (e.g., A549 cells) are transfected with the pool of siNA constructs and cells that demonstrate a phenotype associated with BACE inhibition are sorted. The pool of siNA constructs can be expressed from transcription cassettes inserted into appropriate vectors (see for example FIG. 7 and FIG. 8). The siNA from cells demonstrating a positive phenotypic change (e.g., decreased proliferation, decreased BACE mRNA levels or decreased BACE protein expression), are sequenced to determine the most suitable target site(s) within the target BACE RNA sequence.

### Example 4

### BACE Targeted siNA Design

[0387] siNA target sites were chosen by analyzing sequences of the BACE RNA target and optionally prioritizing the target sites on the basis of folding (structure of any given sequence analyzed to determine siNA accessibility to the target), by using a library of siNA molecules as described in Example 3, or alternately by using an in vitro siNA system as described in Example 6 herein. siNA molecules were designed that could bind each target and are optionally individually analyzed by computer folding to assess whether the siNA molecule can interact with the target sequence. Varying the length of the siNA molecules can be chosen to optimize activity. Generally, a sufficient number of complementary nucleotide bases are chosen to bind to, or otherwise interact with, the target RNA, but the degree of complementarity can be modulated to accommodate siNA duplexes or varying length or base composition. By using such methodologies, siNA molecules can be designed to target sites within any known RNA sequence, for example those RNA sequences corresponding to the any gene transcript.

[0388] Chemically modified siNA constructs are designed to provide nuclease stability for systemic administration in vivo and/or improved pharmacokinetic, localization, and delivery properties while preserving the ability to mediate RNAi activity. Chemical modifications as described herein are introduced synthetically using synthetic methods described herein and those generally known in the art. The synthetic siNA constructs are then assayed for nuclease stability in serum and/or cellular/tissue extracts (e.g. liver extracts). The synthetic siNA constructs are also tested in parallel for RNAi activity using an appropriate assay, such as a luciferase reporter assay as described herein or another suitable assay that can quantity RNAi activity. Synthetic siNA constructs that possess both nuclease stability and RNAi activity can be further modified and re-evaluated in stability and activity assays. The chemical modifications of the stabilized active siNA constructs can then be applied to any siNA sequence targeting any chosen RNA and used, for example, in target screening assays to pick lead siNA compounds for therapeutic development (see for example FIG. 11).

### Example 5

### Chemical Synthesis and Purification of siNA

[0389] siNA molecules can be designed to interact with various sites in the RNA message, for example, target sequences within the RNA sequences described herein. The sequence of one strand of the siNA molecule(s) is complementary to the target site sequences described above. The siNA molecules can be chemically synthesized using methods described herein. Inactive siNA molecules that are used as control sequences can be synthesized by scrambling the sequence of the siNA molecules such that it is not complementary to the target sequence. Generally, siNA constructs can by synthesized using solid phase oligonucleotide synthesis methods as described herein (see for example Usman et al., U.S. Pat. Nos. 5,804,683; 5,831,071; 5,998,203; 6,117,657; 6,353,098; 6,362,323; 6,437,117; 6,469,158; Scaringe et al., U.S. Pat. Nos. 6,111,086; 6,008,400; 6,111,086 all incorporated by reference herein in their entirety).

[0390] In a non-limiting example, RNA oligonucleotides are synthesized in a stepwise fashion using the phosphoramidite chemistry as is known in the art. Standard phosphoramidite chemistry involves the use of nucleosides comprising any of 5′-O-dimethoxytrityl, 2′-O-tert-butyldimethylsilyl, 3′-O-2-Cyanoethyl N,N-diisopropylphos-phoroamidite groups, and exocyclic amine protecting groups (e.g. N6-benzoyl adenosine, N4 acetyl cytidine, and N2-isobutyryl guanosine). Alternately, 2′-O-Silyl Ethers can be used in conjunction with acid-labile 2′-O-orthoester protecting groups in the synthesis of RNA as described by Scaringe supra. Differing 2′ chemistries can require different protecting groups, for example 2′-deoxy-2′-amino nucleosides can utilize N-phthaloyl protection as described by Usman et al., U.S. Pat. No. 5,631,360, incorporated by reference herein in its entirety).

[0391] During solid phase synthesis, each nucleotide is added sequentially (3′- to 5′-direction) to the solid support-bound oligonucleotide. The first nucleoside at the 3 ′-end of the chain is covalently attached to a solid support (e.g., controlled pore glass or polystyrene) using various linkers. The nucleotide precursor, a ribonucleoside phosphoramidite, and activator are combined resulting in the coupling of the second nucleoside phosphoramidite onto the 5′-end of the first nucleoside. The support is then washed and any unreacted 5′-hydroxyl groups are capped with a capping reagent such as acetic anhydride to yield inactive 5 ′-acetyl moieties. The trivalent phosphorus linkage is then oxidized to a more stable phosphate linkage. At the end of the nucleotide addition cycle, the 5′-O-protecting group is cleaved under suitable conditions (e.g., acidic conditions for trityl-based groups and Fluoride for silyl-based groups). The cycle is repeated for each subsequent nucleotide.

[0392] Modification of synthesis conditions can be used to optimize coupling efficiency, for example by using differing coupling times, differing reagent/phosphoramidite concentrations, differing contact times, differing solid supports and solid support linker chemistries depending on the particular chemical composition of the siNA to be synthesized. Deprotection and purification of the siNA can be performed as is generally described in Deprotection and purification of the siNA can be performed as is generally described in Usman et al., U.S. Pat. No. 5,831,071, U.S. Pat. No. 6,353,098, U.S. Pat. No. 6,437,117, and Bellon et al., U.S. Pat. No. 6,054,576, U.S. Pat. No. 6,162,909, U.S. Pat. No. 6,303,773, or Scaringe supra, incorporated by reference herein in their entireties. Additionally, deprotection conditions can be modified to provide the best possible yield and purity of siNA constructs. For example, applicant has observed that oligonucleotides comprising 2′-deoxy-2′-fluoro nucleotides can degrade under inappropriate deprotection conditions. Such oligonucleotides are deprotected using aqueous methylamine at about 35° C. for 30 minutes. If the 2′-deoxy-2′-fluoro containing oligonucleotide also comprises ribonucleotides, after deprotection with aqueous methylamine at about 35° C. for 30 minutes, TEA-HF is added and the reaction maintained at about 65° C. for an additional 15 minutes.

### Example 6

### RNAi In Vitro Assay to Assess siNA Activity

[0393] An in vitro assay that recapitulates RNAi in a cell-free system is used to evaluate siNA constructs targeting BACE RNA targets. The assay comprises the system described by Tuschl et al., 1999, Genes and Development, 13, 3191-3197 and Zamore et al., 2000, Cell, 101, 25-33 adapted for use with BACE target RNA. A Drosophila extract derived from syncytial blastoderm is used to reconstitute RNAi activity in vitro. Target RNA is generated via in vitro transcription from an appropriate BACE expressing plasmid using T7 RNA polymerase or via chemical synthesis as described herein. Sense and antisense siNA strands (for example 20 uM each) are annealed by incubation in buffer (such as 100 mM potassium acetate, 30 mM HEPES-KOH, pH 7.4, 2 mM magnesium acetate) for 1 minute at 90° C. followed by 1 hour at 37° C. , then diluted in lysis buffer (for example 100 mM potassium acetate, 30 mM HEPES-KOH at pH 7.4, 2 mM magnesium acetate). Annealing can be monitored by gel electrophoresis on an agarose gel in TBE buffer and stained with ethidium bromide. The Drosophila lysate is prepared using zero to two-hour-old embryos from Oregon R flies collected on yeasted molasses agar that are dechorionated and lysed. The lysate is centrifuged and the supernatant isolated. The assay comprises a reaction mixture containing 50% lysate [vol/vol], RNA (10-50 pM final concentration), and 10% [vol/vol] lysis buffer containing siNA (10 nM final concentration). The reaction mixture also contains 10 mM creatine phosphate, 10 ug/ml creatine phosphokinase, 100 um GTP, 100 uM UTP, 100 uM CTP, 500 uM ATP, 5 mM DTT, 0.1 U/uL RNasin (Promega), and 100 uM of each amino acid. The final concentration of potassium acetate is adjusted to 100 mM. The reactions are pre-assembled on ice and preincubated at 25° C. for 10 minutes before adding RNA, then incubated at 25° C. for an additional 60 minutes. Reactions are quenched with 4 volumes of 1.25×Passive Lysis Buffer (Promega). Target RNA cleavage is assayed by RT-PCR analysis or other methods known in the art and are compared to control reactions in which siNA is omitted from the reaction.

[0394] Alternately, internally-labeled target RNA for the assay is prepared by in vitro transcription in the presence of [alpha-³²p] CTP, passed over a G50 Sephadex column by spin chromatography and used as target RNA without further purification. Optionally, target RNA is 5′-³²P-end labeled using T4 polynucleotide kinase enzyme. Assays are performed as described above and target RNA and the specific RNA cleavage products generated by RNAi are visualized on an autoradiograph of a gel. The percentage of cleavage is determined by PHOSPHOR IMAGER® (autoradiography) quantitation of bands representing intact control RNA or RNA from control reactions without siNA and the cleavage products generated by the assay.

[0395] In one embodiment, this assay is used to determine target sites in the BACE RNA target for siNA mediated RNAi cleavage, wherein a plurality of siNA constructs are screened for RNAi mediated cleavage of the BACE RNA target, for example, by analyzing the assay reaction by electrophoresis of labeled target RNA, or by northern blotting, as well as by other methodology well known in the art.

### Example 7

### Nucleic Acid Inhibition of BACE Target RNA

[0396] siNA molecules targeted to the human BACE RNA are designed and synthesized as described above. These nucleic acid molecules can be tested for cleavage activity in vivo, for example, using the following procedure. The target sequences and the nucleotide location within the BACE RNA are given in Tables II and III.

[0397] Two formats are used to test the efficacy of siNAs targeting BACE. First, the reagents are tested in cell culture using, for example, cultured A549 cells, 7PA2 cells, Chinese hamster ovary (CHO) cells, APPsw (Swedish type amyloid precursor protein expressing) cells, or SK—N—SH cells, to determine the extent of RNA and protein inhibition. siNA reagents (e.g.; see Tables II and III) are selected against the BACE target as described herein. RNA inhibition is measured after delivery of these reagents by a suitable transfection agent to, for example, A549 cells, 7PA2 cells, CHO cells, APPsw cells, or SK—N—SH cells. Relative amounts of target RNA are measured versus actin using real-time PCR monitoring of amplification (eg., ABI 7700 TAQMAN®). A comparison is made to a mixture of oligonucleotide sequences made to unrelated targets or to a randomized siNA control with the same overall length and chemistry, but randomly substituted at each position. Primary and secondary lead reagents are chosen for the target and optimization performed. After an optimal transfection agent concentration is chosen, a RNA time-course of inhibition is performed with the lead siNA molecule. In addition, a cell-plating format can be used to determine RNA inhibition.

Delivery of siNA to Cells

[0398] Cells (e.g., A549 cells, 7PA2 cells, CHO cells, APPsw cells, or SK—N—SH cells) are seeded, for example, at 1×10⁵ cells per well of a six-well dish in EGM-2 (BioWhittaker) the day before transfection. siNA (final concentration, for example 2OnM) and cationic lipid (e.g., final concentration 2 μg/ml) are complexed in EGM basal media (Bio Whittaker) at 37° C. for 30 minutes in polystyrene tubes. Following vortexing, the complexed siNA is added to each well and incubated for the times indicated. For initial optimization experiments, cells are seeded, for example, at 1×10³ in 96 well plates and siNA complex added as described. Efficiency of delivery of siNA to cells is determined using a fluorescent siNA complexed with lipid. Cells in 6-well dishes are incubated with siNA for 24 hours, rinsed with PBS and fixed in 2% paraformaldehyde for 15 minutes at room temperature. Uptake of siNA is visualized using a fluorescent microscope.

TAOMAN® (Real-time PCR Monitoring of Amplification) and Lightcycler Quantification of mRNA

[0399] Total RNA is prepared from cells following siNA delivery, for example, using Qiagen RNA purification kits for 6-well or Rneasy extraction kits for 96-well assays. For TAQMAN® analysis (real-time PCR monitoring of amplification), dual-labeled probes are synthesized with the reporter dye, FAM or JOE, covalently linked at the 5′-end and the quencher dye TAMRA conjugated to the 3′-end. One-step RT-PCR amplifications are performed on, for example, an ABI PRISM 7700 Sequence Detector using 50 μl reactions consisting of 10 μl total RNA, 100 nM forward primer, 900 nM reverse primer, 100 nM probe, 1× TaqMan PCR reaction buffer (PE-Applied Biosystems), 5.5 mM MgCl₂, 300 μM each dATP, dCTP, dGTP, and dTTP, 100 U RNase Inhibitor (Promega), 1.25 U AMPLITAQ GOLD® (DNA polymerase) (PE-Applied Biosystems) and 100 U M-MLV Reverse Transcriptase (Promega). The thermal cycling conditions can consist of 30 minutes at 48° C., 10 minutes at 95° C., followed by 40 cycles of 15 seconds at 95° C. and 1 minute at 60° C. Quantitation of mRNA levels is determined relative to standards generated from serially diluted total cellular RNA (300, 100, 33, 11 ng/rxn) and normalizing to β-actin or GAPDH mRNA in parallel TAQMAN® reactions (real-time PCR monitoring of amplification). For each gene of interest an upper and lower primer and a fluorescently labeled probe are designed. Real time incorporation of SYBR Green I dye into a specific PCR product can be measured in glass capillary tubes using a lightcyler. A standard curve is generated for each primer pair using control cRNA. Values are represented as relative expression to GAPDH in each sample.

Western Blotting

[0400] Nuclear extracts can be prepared using a standard micro preparation technique (see for example Andrews and Faller, 1991, Nucleic Acids Research, 19, 2499). Protein extracts from supernatants are prepared, for example using TCA precipitation. An equal volume of 20% TCA is added to the cell supernatant, incubated on ice for 1 hour and pelleted by centrifugation for 5 minutes. Pellets are washed in acetone, dried and resuspended in water. Cellular protein extracts are run on a 10% Bis-Tris NuPage (nuclear extracts) or 4-12% Tris-Glycine (supernatant extracts) polyacrylamide gel and transferred onto nitro-cellulose membranes. Non-specific binding can be blocked by incubation, for example, with 5% non-fat milk for 1 hour followed by primary antibody for 16 hour at 4° C. Following washes, the secondary antibody is applied, for example (1:10,000 dilution) for 1 hour at room temperature and the signal detected with SuperSignal reagent (Pierce).

### Example 8

### Models Useful to Evaluate the Down-regulation of BACE Gene Expression

Cell Culture

[0401] Vassar et al., 1999, Science, 286, 735-741, describe a cell culture model for studying BACE inhibition. Specific antisense nucleic acid molecules targeting BACE mRNA were used for inhibition studies of endogenous BACE expression in 101 cells and APPsw (Swedish type amyloid precursor protein expressing) cells via lipid mediated transfection. Antisense treatment resulted in dramatic reduction of both BACE mRNA by Northern blot analysis, and APPsβsw (“Swedish” type β-secretase cleavage product) by ELISA, with maximum inhibition of both parameters at 75-80%. This model was also used to study the effect of BACE inhibition on amyloid β-peptide production in APPsw cells. Similarly, such a model can be used to screen siRNA molecules of the instant invention for efficacy and potency.

[0402] In several cell culture systems, cationic lipids have been shown to enhance the bioavailability of oligonucleotides to cells in culture (Bennet, et al., 1992, Mol. Pharmacology, 41, 1023-1033). In one embodiment, siNA molecules of the invention are complexed with cationic lipids for cell culture experiments. siNA and cationic lipid mixtures are prepared in serum-free DMEM immediately prior to addition to the cells. DMEM plus additives are warmed to room temperature (about 20-25° C.) and cationic lipid is added to the final desired concentration and the solution is vortexed briefly. siNA molecules are added to the final desired concentration and the solution is again vortexed briefly and incubated for 10 minutes at room temperature. In dose response experiments, the RNA/lipid complex is serially diluted into DMEM following the 10 minute incubation.

[0403] Animal Models Evaluating the efficacy of anti-BACE agents in animal models is an important prerequisite to human clinical trials. Games et al., 1995, Nature, 373, 523-527, describe a transgenic mouse model in which mutant human familial type APP (Phe 717 instead of Val) is overexpressed. This model results in mice that progressively develop many of the pathological hallmarks of Alzheimer's disease, and as such, provides a model for testing therapeutic drugs, including siNA constructs of the instant invention.

### Example 9

### RNAi Mediated Inhibition of BACE, APP, PS1 or PS2 Expression in Cell Culture

Inhibition of BACE, APP, PS1, or PS2 RNA Expression Using siNA Targeting BACE, APP, PS1, or PS2 RNA

[0404] siNA constructs (Table III) are tested for efficacy in reducing BACE, APP, PS1 or PS2 RNA expression in A549 or SK—N—SH cells. Cells are plated approximately 24 hours before transfection in 96-well plates at 5,000-7,500 cells/well, 100 μl/well, such that at the time of transfection cells are 70-90% confluent. For transfection, annealed siNAs are mixed with the transfection reagent (Lipofectamine 2000, Invitrogen) in a volume of 50 μl/well and incubated for 20 minutes at room temperature. The siNA transfection mixtures are added to cells to give a final siNA concentration of 25 nM in a volume of 150 μl. Each siNA transfection mixture is added to 3 wells for triplicate siNA treatments. Cells are incubated at 37° for 24 hours in the continued presence of the siNA transfection mixture. At 24 hours, RNA is prepared from each well of treated cells. The supernatants with the transfection mixtures are first removed and discarded, then the cells are lysed and RNA prepared from each well. Target gene expression following treatment is evaluated by RT-PCR for the target gene and for a control gene (36B4, an RNA polymerase subunit) for normalization. The triplicate data is averaged and the standard deviations determined for each treatment. Normalized data are graphed and the percent reduction of target mRNA by active siNAs in comparison to their respective inverted control siNAs is determined.

[0405] In a non-limiting example, using the method described above, siNA constructs were screened for activity (see FIG. 22) and compared to untreated cells, scrambled siNA control constructs (Scram1 and Scram2), and cells transfected with lipid alone (transfection control). As shown in FIG. 22, the siNA constructs show significant reduction of BACE RNA expression. Leads generated from such a screen are then further assayed. In a non-limiting example, siNA constructs comprising ribonucleotides and 3′-terminal dithymidine caps are assayed along with a chemically modified siNA construct comprising 2′-deoxy-2′-fluoro pyrimidine nucleotides and purine ribonucleotides, in which the sense strand of the siNA is further modified with 5′ and 3′-terminal inverted deoxyabasic caps and the antisense strand comprises a 3′-terminal phosphorothioate internucleotide linkage. Additional stabilization chemistries as described in Table IV are similarly assayed for activity. These siNA constructs are compared to appropriate matched chemistry inverted controls. In addition, the siNA constructs are also compared to untreated cells, cells transfected with lipid and scrambled siNA constructs, and cells transfected with lipid alone (transfection control).

[0406] Using the method described above, a lead siNA construct (31007/31083) chosen from the screen described in FIG. 22 above was further modified using chemical modifications described in Table IV herein. Results are shown in FIG. 23. A549 cells were transfected with 0.25 ug/well of lipid complexed with 25 nM siNA. Chemically modified constructs having Stab 4/5 chemistry (31378/31381) and Stab 7/11 chemistry (31384/31387) (solid bars; see Table IV) were tested for efficacy compared to matched chemistry inverted controls (open bars; sequences of the siNA constructs shown in Table III). The original lead siNA construct (31007/31083) and the Stab 4/5 and Stab 7/11 constructs were compared to untreated cells, scrambled siNA control constructs (Scram1 and Scram2), and cells transfected with lipid alone (transfection control). As shown in FIG. 23, the original lead construct and the Stab 4/5 and Stab 7/11 modified siNA constructs all show significant reduction of BACE RNA expression.

[0407] FIG. 24 shows a non-limiting example of the reduction of APP mRNA in SK—N—SH cells mediated by siNAs that target APP mRNA. SK—N—SH cells were transfected with 0.25 ug/well of lipid complexed with 25 nM siNA. Active chemically modified siNA constructs (solid bars; see Tables III and IV) were compared to untreated cells, matched chemistry irrelevant siNA control constructs (IC-1), and cells transfected with lipid alone (transfection control). As shown in FIG. 24, the siNA constructs significantly reduce APP RNA expression compared with irrelevant siNA control and transfection control constructs.

[0408] FIG. 25 shows a non-limiting example of the reduction of PSEN1 mRNA in SK—N—SH cells mediated by siNAs that target PSEN1 mRNA. SK—N—SH cells were transfected with 0.25 ug/well of lipid complexed with 25 nM siNA. Active chemically modified siNA constructs (solid bars; see Tables III and IV) were compared to untreated cells, matched chemistry irrelevant siNA control constructs (IC-1), and cells transfected with lipid alone (transfection control). As shown in FIG. 25, the siNA constructs significantly reduce PSEN1 RNA expression compared with irrelevant siNA control and transfection control constructs.

[0409] FIG. 26 shows a non-limiting example of the reduction of PSEN2 mRNA in SK—N—SH cells mediated by siNAs that target PSEN2 mRNA. SK—N—SH cells were transfected with 0.25 ug/well of lipid complexed with 25 nM siNA. Active chemically modified siNA constructs (solid bars; see Tables III and IV) were compared to untreated cells, matched chemistry irrelevant siNA control constructs (IC-1), and cells transfected with lipid alone (transfection control). As shown in FIG. 26, the siNA constructs significantly reduce PSEN2 RNA expression compared with irrelevant siNA control and transfection control constructs.

### Example 10

### Indications

[0410] Particular degenerative and disease states that can be associated with BACE, APP, PIN-1, PS-1 and/or PS-2 expression modulation include but are not limited to: Alzheimer's disease, dementia, stroke (CVA) and any other diseases or conditions that are related to the levels of BACE, APP, PIN-1, PS-1 and/or PS-2 in a cell or tissue, alone or in combination with other therapies. The reduction of BACE, APP, PIN-1, PS-1 and/or PS-2 expression (specifically BACE, APP, PIN-1, PS-1 and/or PS-2 RNA levels) and thus reduction in the level of the respective protein relieves, to some extent, the symptoms of the disease or condition.

[0411] Those skilled in the art will recognize that other drug compounds and therapies may be readily combined with or used in conjuction with the nucleic acid molecules of the instant invention (e.g., siNA molecules) are hence within the scope of the instant invention.

### Example 11

### Diagnostic Uses

[0412] The siNA molecules of the invention can be used in a variety of diagnostic applications, such as in the identification of molecular targets (e.g., RNA) in a variety of applications, for example, in clinical, industrial, environmental, agricultural and/or research settings. Such diagnostic use of siNA molecules involves utilizing reconstituted RNAi systems, for example, using cellular lysates or partially purified cellular lysates. siNA molecules of this invention can be used as diagnostic tools to examine genetic drift and mutations within diseased cells or to detect the presence of endogenous or exogenous, for example viral, RNA in a cell. The close relationship between siNA activity and the structure of the target RNA allows the detection of mutations in any region of the molecule, which alters the base-pairing and three-dimensional structure of the target RNA. By using multiple siNA molecules described in this invention, one can map nucleotide changes, which are important to RNA structure and function in vitro, as well as in cells and tissues. Cleavage of target RNAs with siNA molecules can be used to inhibit gene expression and define the role of specified gene products in the progression of disease or infection. In this manner, other genetic targets can be defined as important mediators of the disease. These experiments will lead to better treatment of the disease progression by affording the possibility of combination therapies (e.g., multiple siNA molecules targeted to different genes, siNA molecules coupled with known small molecule inhibitors, or intermittent treatment with combinations siNA molecules and/or other chemical or biological molecules). Other in vitro uses of siNA molecules of this invention are well known in the art, and include detection of the presence of mRNAs associated with a disease, infection, or related condition. Such RNA is detected by determining the presence of a cleavage product after treatment with a siNA using standard methodologies, for example, fluorescence resonance emission transfer (FRET).

[0413] In a specific example, siNA molecules that cleave only wild-type or mutant forms of the target RNA are used for the assay. The first siNA molecules (i.e., those that cleave only wild-type forms of target RNA) are used to identify wild-type RNA present in the sample and the second siNA molecules (i.e., those that cleave only mutant forms of target RNA) are used to identify mutant RNA in the sample. As reaction controls, synthetic substrates of both wild-type and mutant RNA are cleaved by both siNA molecules to demonstrate the relative siNA efficiencies in the reactions and the absence of cleavage of the “non-targeted” RNA species. The cleavage products from the synthetic substrates also serve to generate size markers for the analysis of wild-type and mutant RNAs in the sample population. Thus, each analysis requires two siNA molecules, two substrates and one unknown sample, which is combined into six reactions. The presence of cleavage products is determined using an RNase protection assay so that full-length and cleavage fragments of each RNA can be analyzed in one lane of a polyacrylamide gel. It is not absolutely required to quantify the results to gain insight into the expression of mutant RNAs and putative risk of the desired phenotypic changes in target cells. The expression of mRNA whose protein product is implicated in the development of the phenotype (i.e., disease related or infection related) is adequate to establish risk. If probes of comparable specific activity are used for both transcripts, then a qualitative comparison of RNA levels is adequate and decreases the cost of the initial diagnosis. Higher mutant form to wild-type ratios are correlated with higher risk whether RNA levels are compared qualitatively or quantitatively.

[0414] All patents and publications mentioned in the specification are indicative of the levels of skill of those skilled in the art to which the invention pertains. All references cited in this disclosure are incorporated by reference to the same extent as if each reference had been incorporated by reference in its entirety individually.

[0415] One skilled in the art would readily appreciate that the present invention is well adapted to carry out the objects and obtain the ends and advantages mentioned, as well as those inherent therein. The methods and compositions described herein as presently representative of preferred embodiments are exemplary and are not intended as limitations on the scope of the invention. Changes therein and other uses will occur to those skilled in the art, which are encompassed within the spirit of the invention, are defined by the scope of the claims.

[0416] It will be readily apparent to one skilled in the art that varying substitutions and modifications can be made to the invention disclosed herein without departing from the scope and spirit of the invention. Thus, such additional embodiments are within the scope of the present invention and the following claims. The present invention teaches one skilled in the art to test various combinations and/or substitutions of chemical modifications described herein toward generating nucleic acid constructs with improved activity for mediating RNAi activity. Such improved activity can comprise improved stability, improved bioavailability, and/or improved activation of cellular responses mediating RNAi. Therefore, the specific embodiments described herein are not limiting and one skilled in the art can readily appreciate that specific combinations of the modifications described herein can be tested without undue experimentation toward identifying siNA molecules with improved RNAi activity.

[0417] The invention illustratively described herein suitably can be practiced in the absence of any element or elements, limitation or limitations that are not specifically disclosed herein. Thus, for example, in each instance herein any of the terms “comprising”, “consisting essentially of”, and “consisting of” may be replaced with either of the other two terms. The terms and expressions which have been employed are used as terms of description and not of limitation, and there is no intention that in the use of such terms and expressions of excluding any equivalents of the features shown and described or portions thereof, but it is recognized that various modifications are possible within the scope of the invention claimed. Thus, it should be understood that although the present invention has been specifically disclosed by preferred embodiments, optional features, modification and variation of the concepts herein disclosed may be resorted to by those skilled in the art, and that such modifications and variations are considered to be within the scope of this invention as defined by the description and the appended claims.

[0418] In addition, where features or aspects of the invention are described in terms of Markush groups or other grouping of alternatives, those skilled in the art will recognize that the invention is also thereby described in terms of any individual member or subgroup of members of the Markush group or other group.

[0419] TABLE I
Accession Numbers

NM_012104
Homo sapiens beta-site APP-cleaving enzyme (BACE),
transcript variant a, mRNA
gi|21040369|ref|NM_012104.2|[21040369]
NM_006222
Homo sapiens protein (peptidyl-prolyl cis/trans
isomerase) NIMA-interacting 1-like (PIN1L), mRNA
gi|5453899|ref|NM_006222.1|[5453899]
L76517
Homo sapiens (clone cc44) senilin 1 (PS1; S182) mRNA, complete cds
gi|1479973|gb|L76517.1|HUMPS1MRNA[1479973]
L43964
Homo sapiens (clone F-T03796) STM-2 mRNA, complete cds
gi|951202|gb|L43964.1|HUMSTM2R[951202]
NM_138973
Homo sapiens beta-site APP-cleaving enzyme (BACE),
transcript variant d, mRNA
gi|21040367|ref|NM_138973.1|[21040367]
NM_138972
Homo sapiens beta-site APP-cleaving enzyme (BACE),
transcript variant b, mRNA
gi|21040365|ref|NM_138972.1|[21040365]
NM_138971
Homo sapiens beta-site APP-cleaving enzyme (BACE),
transcript variant c, mRNA
gi|21040363|ref|NM_138971.1|[21040363]
AK075049
Homo sapiens cDNA FLJ90568 fis, clone OVARC1001570,
highly similar to Homo sapiens beta-site APP cleaving enzyme
(BACE) mRNA
gi|22760888|dbj|AK075049.1|[22760888]
AF527782
Homo sapiens beta-site APP-cleaving enzyme (BACE)
mRNA, partial cds, alternatively spliced
gi|22094870|gb|AF527782.1|[22094870]
AF324837
Homo sapiens beta-site APP cleaving enzyme mRNA,
partial cds, alternatively spliced
gi|21449275|gb|AF324837.1|[21449275]
AF338817
Homo sapiens beta-site APP cleaving enzyme type C
mRNA, complete cds
gi|13699247|gb|AF338817.1|[13699247]
AF338816
Homo sapiens beta-site APP cleaving enzyme type B
mRNA, complete cds
gi|13699245|gb|AF338816.1|[13699245]
AB050438
Homo sapiens BACE mRNA for beta-site APP cleaving
enzyme I-432, complete cds
gi|13568410|dbj|AB050438.1|[13568410]
AB050437
Homo sapiens BACE mRNA for beta-site APP cleaving
enzyme I-457, complete cds
gi|13568408|dbj|AB050437.1|[13568408]
AB050436
Homo sapiens BACE mRNA for beta-site APP cleaving
enzyme I-476, complete cds
gi|13568406|dbj|AB050436.1|[13568406]
AF190725
Homo sapiens beta-site APP cleaving enzyme (BACE)
mRNA, complete cds
gi|6118538|gb|AF190725.1|AF190725[6118538]
NM_007319
Homo sapiens presenilin 1 (Alzheimer disease 3)
(PSEN1), transcript variant I-374., mRNA
gi|7549814|ref|NM_007319.1|[7549814]
NM 138992
Homo sapiens beta-site APP-cleaving enzyme 2 (BACE2),
transcript variant b, mRNA
gi|21040361|ref|NM_138992.1|[21040361]
NM_138991
Homo sapiens beta-site APP-cleaving enzyme 2 (BACE2),
transcript variant c, mRNA
gi|21040359|ref|NM_138991.1|[21040359]
NM_012105
Homo sapiens beta-site APP-cleaving enzyme 2 (BACE2),
transcript variant a, mRNA
gi|21040358|ref|NM_012105.3|[21040358]
AB066441
Homo sapiens APP mRNA for amyloid precursor protein,
partial cds, D678N mutant
gi|16904654|dbj|AB066441.1|[16904654]
AB050438
Homo sapiens BACE mRNA for beta-site APP cleaving
enzyme I-432, complete cds
gi|13568410|dbj|AB050438.1|[13568410]
AB050437
Homo sapiens BACE mRNA for beta-site APP cleaving
enzyme I-457, complete cds
gi|13568408|dbj|AB050437.1|[13568408]
AB050436
Homo sapiens BACE mRNA for beta-site APP cleaving
enzyme I-476, complete cds
gi|13568406|dbj|AB050436.1|[13568406]
NM_012486
Homo sapiens presenilin 2 (Alzheimer disease 4)
(PSEN2), transcript variant 2, mRNA
gi|7108359|ref|NM_012486.1|[7108359]
NM_000447
Homo sapiens presenilin 2 (Alzheimer disease 4)
(PSEN2), transcript variant 1, mRNA
gi|4506164|ref|NM_000447.1|[4506164]
AF188277
Homo sapiens aspartyl protease (BACE2) mRNA, complete
cds, alternatively spliced
gi|7025334|gb|AF188277.1|AF188277[7025334]
AF188276
Homo sapiens aspartyl protease (BACE2) mRNA, complete
cds, alternatively spliced
gi|7025332|gb|AF188276.1|AF188276[7025332]
AF178532
Homo sapiens aspartyl protease (BACE2) mRNA, complete cds
gi|6851265|gb|AF178532.1|AF178532[6851265]
D87675
Homo sapiens DNA for amyloid precursor protein, complete cds
gi|2429080|dbj|D87675.1|[2429080]
AF201468
Homo sapiens APP beta-secretase mRNA, complete cds
gi|6601444|gb|AF201468.1|AF201468[6601444]
AF190725
Homo sapiens beta-site APP cleaving enzyme (BACE)
mRNA, complete cds
gi|6118538|gb|AF190725.1|AF190725[6118538]
E14707
DNA encoding a mutated amyloid precursor protein
gi|5709390|dbj|E14707.1|pat|JP|1998001499|1[5709390]
AF168956
Homo sapiens amyloid precursor protein homolog HSD-2
mRNA, complete cds
gi|5702387|gb|AF168956.1|AF168956[5702387]
S60099
APPH = amyloid precursor protein homolog [human,
placenta, mRNA, 3727 nt]
gi|300168|bbm|300685|bbs|131198|gb|S60099.1|S60099[300168]
U50939
Human amyloid precursor protein-binding protein 1
mRNA, complete cds
gi|1314559|gb|U50939.1|HSU50939[1314559]
NM_000484
Homo sapiens amyloid beta (A4) precursor protein
(protease nexin-II, Alzheimer disease) (APP), transcript variant
1, mRNA
gi|41406053|ref|NM_000484.2|[41406053]
BC018937
Homo sapiens amyloid beta (A4) precursor protein
(protease nexin-II, Alzheimer disease), mRNA (cDNA clone IMAGE:
4126584)
gi|39645179|gb|BC018937.2|[39645179]
NM_201413
Homo sapiens amyloid beta (A4) precursor protein
(protease nexin-II, Alzheimer disease) (APP), transcript variant
2, mRNA
gi|41406054|ref|NM_201413.1|[41406054]
NM_201414
Homo sapiens amyloid beta (A4) precursor protein
(protease nexin-II, Alzheimer disease) (APP), transcript variant
3, mRNA
gi|41406056|ref|NM_201414.1|[41406056]
BC065529
Homo sapiens amyloid beta (A4) precursor protein
(protease nexin-II, Alzheimer disease), transcript variant
2, mRNA (cDNA clone MGC: 75167 IMAGE: 6152423), complete cds
gi|41350938|gb|BC065529.1|[41350938]
Y00264
Human mRNA for amyloid A4 precursor of Alzheimer's disease
gi|28525|emb|Y00264.1|HSAFPA4[28525]
AF282245
Homo sapiens amyloid precursor protein 639 (APP639)
mRNA, complete cds
gi|33339673|gb|AF282245.1|[33339673]
X06989
Homo sapiens mRNA for amyloid A4 protein (APP gene)
gi|28720|emb|X06989.1|HSAPA4R[28720]

[0420] TABLE II

APP, BACE, PSEN1, PSEN2 siNA AND TARGET SEQUENCES

| | | |
|---|---|---|
| Seq | Seq | Seq |

| | | | | | | | | |
|---|---|---|---|---|---|---|---|---|
| Pos | Seq | ID | UPos | Upper seq | ID | LPos | Lower seq | ID |

APP NM_000484

| | | | | | | | | |
|---|---|---|---|---|---|---|---|---|
| 3 | UUUCCUCGGCAGCGGUAGG | 1 | 3 | UUUCCUCGGCAGCGGUAGG | 1 | 21 | CCUACCGCUGCCGAGGAAA | 200 |
| 21 | GCGAGAGCACGCGGAGGAG | 2 | 21 | GCGAGAGCACGCGGAGGAG | 2 | 39 | CUCCUCCGCGUGCUCUCGC | 201 |
| 39 | GCGUGCGCGGGGGCCCCGG | 3 | 39 | GCGUGCGCGGGGGCCCCGG | 3 | 57 | CCGGGGCCCCCGCGCACGC | 202 |
| 57 | GGAGACGGCGGCGGUGGCG | 4 | 57 | GGAGACGGCGGCGGUGGCG | 4 | 75 | CGCCACCGCCGCCGUCUCC | 203 |
| 75 | GGCGCGGGCAGAGCAAGGA | 5 | 75 | GGCGCGGGCAGAGCAAGGA | 5 | 93 | UCCUUGCUCUGCCCGCGCC | 204 |
| 93 | ACGCGGCGGAUCCCACUCG | 6 | 93 | ACGCGGCGGAUCCCACUCG | 6 | 111 | CGAGUGGGAUCCGCCGCGU | 205 |
| 111 | GCACAGCAGCGCACUCGGU | 7 | 111 | GCACAGCAGCGCACUCGGU | 7 | 129 | ACCGAGUGCGCUGCUGUGC | 206 |
| 129 | UGCCCCGCGCAGGGUCGCG | 8 | 129 | UGCCCCGCGCAGGGUCGCG | 8 | 147 | CGCGACCCUGCGCGGGGCA | 207 |
| 147 | GAUGCUGCCCGGUUUGGCA | 9 | 147 | GAUGCUGCCCGGUUUGGCA | 9 | 165 | UGCCAAACCGGGCAGCAUC | 208 |
| 165 | ACUGCUCCUGCUGGCCGCC | 10 | 165 | ACUGCUCCUGCUGGCCGCC | 10 | 183 | GGCGGCCAGCAGGAGCAGU | 209 |
| 183 | CUGGACGGCUCGGGCGCUG | 11 | 183 | CUGGACGGCUCGGGCGCUG | 11 | 201 | CAGCGCCCGAGCCGUCCAG | 210 |
| 201 | GGAGGUACCCACUGAUGGU | 12 | 201 | GGAGGUACCCACUGAUGGU | 12 | 219 | ACCAUCAGUGGGUACCUCC | 211 |
| 219 | UAAUGCUGGCCUGCUGGCU | 13 | 219 | UAAUGCUGGCCUGCUGGCU | 13 | 237 | AGCCAGCAGGCCAGCAUUA | 212 |
| 237 | UGAACCCCAGAUUGCCAUG | 14 | 237 | UGAACCCCAGAUUGCCAUG | 14 | 255 | CAUGGCAAUCUGGGGUUCA | 213 |
| 255 | GUUCUGUGGCAGACUGAAC | 15 | 255 | GUUCUGUGGCAGACUGAAC | 15 | 273 | GUUCAGUCUGCCACAGAAC | 214 |
| 273 | CAUGCACAUGAAUGUCCAG | 16 | 273 | CAUGCACAUGAAUGUCCAG | 16 | 291 | CUGGACAUUCAUGUGCAUG | 215 |
| 291 | GAAUGGGAAGUGGGAUUCA | 17 | 291 | GAAUGGGAAGUGGGAUUCA | 17 | 309 | UGAAUCCCACUUCCCAUUC | 216 |
| 309 | AGAUCCAUCAGGGACCAAA | 18 | 309 | AGAUCCAUCAGGGACCAAA | 18 | 327 | UUUGGUCCCUGAUGGAUCU | 217 |
| 327 | AACCUGCAUUGAUACCAAG | 19 | 327 | AACCUGCAUUGAUACCAAG | 19 | 345 | CUUGGUAUCAAUGCAGGUU | 218 |
| 345 | GGAAGGCAUCCUGCAGUAU | 20 | 345 | GGAAGGCAUCCUGCAGUAU | 20 | 363 | AUACUGCAGGAUGCCUUCC | 219 |
| 363 | UUGCCAAGAAGUCUACCCU | 21 | 363 | UUGCCAAGAAGUCUACCCU | 21 | 381 | AGGGUAGACUUCUUGGCAA | 220 |
| 381 | UGAACUGCAGAUCACCAAU | 22 | 381 | UGAACUGCAGAUCACCAAU | 22 | 399 | AUUGGUGAUCUGCAGUUCA | 221 |
| 399 | UGUGGUAGAAGCCAACCAA | 23 | 399 | UGUGGUAGAAGCCAACCAA | 23 | 417 | UUGGUUGGCUUCUACCACA | 222 |
| 417 | ACCAGUGACCAUCCAGAAC | 24 | 417 | ACCAGUGACCAUCCAGAAC | 24 | 435 | GUUCUGGAUGGUCACUGGU | 223 |
| 435 | CUGGUGCAAGCGGGGCCGC | 25 | 435 | CUGGUGCAAGCGGGGCCGC | 25 | 453 | GCGGCCCCGCUUGCACCAG | 224 |
| 453 | CAAGCAGUGCAAGACCCAU | 26 | 453 | CAAGCAGUGCAAGACCCAU | 26 | 471 | AUGGGUCUUGCACUGCUUG | 225 |
| 471 | UCCCCACUUUGUGAUUCCC | 27 | 471 | UCCCCACUUUGUGAUUCCC | 27 | 489 | GGGAAUCACAAAGUGGGGA | 226 |
| 489 | CUACCGCUGCUUAGUUGGU | 28 | 489 | CUACCGCUGCUUAGUUGGU | 28 | 507 | ACCAACUAAGCAGCGGUAG | 227 |
| 507 | UGAGUUUGUAAGUGAUGCC | 29 | 507 | UGAGUUUGUAAGUGAUGCC | 29 | 525 | GGCAUCACUUACAAACUCA | 228 |
| 525 | CCUUCUCGUUCCUGACAAG | 30 | 525 | CCUUCUCGUUCCUGACAAG | 30 | 543 | CUUGUCAGGAACGAGAAGG | 229 |
| 543 | GUGCAAAUUCUUACACCAG | 31 | 543 | GUGCAAAUUCUUACACCAG | 31 | 561 | CUGGUGUAAGAAUUUGCAC | 230 |
| 561 | GGAGAGGAUGGAUGUUUGC | 32 | 561 | GGAGAGGAUGGAUGUUUGC | 32 | 579 | GCAAACAUCCAUCCUCUCC | 231 |
| 579 | CGAAACUCAUCUUCACUGG | 33 | 579 | CGAAACUCAUCUUCACUGG | 33 | 597 | CCAGUGAAGAUGAGUUUCG | 232 |
| 597 | GCACACCGUCGCCAAAGAG | 34 | 597 | GCACACCGUCGCCAAAGAG | 34 | 615 | CUCUUUGGCGACGGUGUGC | 233 |
| 615 | GACAUGCAGUGAGAAGAGU | 35 | 615 | GACAUGCAGUGAGAAGAGU | 35 | 633 | ACUCUUCUCACUGCAUGUC | 234 |
| 633 | UACCAACUUGCAUGACUAC | 36 | 633 | UACCAACUUGCAUGACUAC | 36 | 651 | GUAGUCAUGCAAGUUGGUA | 235 |
| 651 | CGGCAUGUUGCUGCCCUGC | 37 | 651 | CGGCAUGUUGCUGCCCUGC | 37 | 669 | GCAGGGCAGCAACAUGCCG | 236 |
| 669 | CGGAAUUGACAAGUUCCGA | 38 | 669 | CGGAAUUGACAAGUUCCGA | 38 | 687 | UCGGAACUUGUCAAUUCCG | 237 |
| 687 | AGGGGUAGAGUUUGUGUGU | 39 | 687 | AGGGGUAGAGUUUGUGUGU | 39 | 705 | ACACACAAACUCUACCCCU | 238 |
| 705 | UUGCCCACUGGCUGAAGAA | 40 | 705 | UUGCCCACUGGCUGAAGAA | 40 | 723 | UUCUUCAGCCAGUGGGCAA | 239 |
| 723 | AAGUGACAAUGUGGAUUCU | 41 | 723 | AAGUGACAAUGUGGAUUCU | 41 | 741 | AGAAUCCACAUUGUCACUU | 240 |
| 741 | UGCUGAUGCGGAGGAGGAU | 42 | 741 | UGCUGAUGCGGAGGAGGAU | 42 | 759 | AUCCUCCUCCGCAUCAGCA | 241 |
| 759 | UGACUCGGAUGUCUGGUGG | 43 | 759 | UGACUCGGAUGUCUGGUGG | 43 | 777 | CCACCAGACAUCCGAGUCA | 242 |
| 777 | GGGCGGAGCAGACACAGAC | 44 | 777 | GGGCGGAGCAGACACAGAC | 44 | 795 | GUCUGUGUCUGCUCCGCCC | 243 |
| 795 | CUAUGCAGAUGGGAGUGAA | 45 | 795 | CUAUGCAGAUGGGAGUGAA | 45 | 813 | UUCACUCCCAUCUGCAUAG | 244 |
| 813 | AGACAAAGUAGUAGAAGUA | 46 | 813 | AGACAAAGUAGUAGAAGUA | 46 | 831 | UACUUCUACUACUUUGUCU | 245 |
| 831 | AGCAGAGGAGGAAGAAGUG | 47 | 831 | AGCAGAGGAGGAAGAAGUG | 47 | 849 | CACUUCUUCCUCCUCUGCU | 246 |
| 849 | GGCUGAGGUGGAAGAAGAA | 48 | 849 | GGCUGAGGUGGAAGAAGAA | 48 | 867 | UUCUUCUUCCACCUCAGCC | 247 |
| 867 | AGAAGCCGAUGAUGACGAG | 49 | 867 | AGAAGCCGAUGAUGACGAG | 49 | 885 | CUCGUCAUCAUCGGCUUCU | 248 |
| 885 | GGACGAUGAGGAUGGUGAU | 50 | 885 | GGACGAUGAGGAUGGUGAU | 50 | 903 | AUCACCAUCCUCAUCGUCC | 249 |
| 903 | UGAGGUAGAGGAAGAGGCU | 51 | 903 | UGAGGUAGAGGAAGAGGCU | 51 | 921 | AGCCUCUUCCUCUACCUCA | 250 |
| 921 | UGAGGAACCCUACGAAGAA | 52 | 921 | UGAGGAACCCUACGAAGAA | 52 | 939 | UUCUUCGUAGGGUUCCUCA | 251 |
| 939 | AGCCACAGAGAGAACCACC | 53 | 939 | AGCCACAGAGAGAACCACC | 53 | 957 | GGUGGUUCUCUCUGUGGCU | 252 |
| 957 | CAGCAUUGCCACCACCACC | 54 | 957 | CAGCAUUGCCACCACCACC | 54 | 975 | GGUGGUGGUGGCAAUGCUG | 253 |
| 975 | CACCACCACCACAGAGUCU | 55 | 975 | CACCACCACCACAGAGUCU | 55 | 993 | AGACUCUGUGGUGGUGGUG | 254 |
| 993 | UGUGGAAGAGGUGGUUCGA | 56 | 993 | UGUGGAAGAGGUGGUUCGA | 56 | 1011 | UCGAACCACCUCUUCCACA | 255 |
| 1011 | AGAGGUGUGCUCUGAACAA | 57 | 1011 | AGAGGUGUGCUCUGAACAA | 57 | 1029 | UUGUUCAGAGCACACCUCU | 256 |
| 1029 | AGCCGAGACGGGGCCGUGC | 58 | 1029 | AGCCGAGACGGGGCCGUGC | 58 | 1047 | GCACGGCCCCGUCUCGGCU | 257 |
| 1047 | CCGAGCAAUGAUCUCCCGC | 59 | 1047 | CCGAGCAAUGAUCUCCCGC | 59 | 1065 | GCGGGAGAUCAUUGCUCGG | 258 |
| 1065 | CUGGUACUUUGAUGUGACU | 60 | 1065 | CUGGUACUUUGAUGUGACU | 60 | 1083 | AGUCACAUCAAAGUACCAG | 259 |
| 1083 | UGAAGGGAAGUGUGCCCCA | 61 | 1083 | UGAAGGGAAGUGUGCCCCA | 61 | 1101 | UGGGGCACACUUCCCUUCA | 260 |
| 1101 | AUUCUUUUACGGCGGAUGU | 62 | 1101 | AUUCUUUUACGGCGGAUGU | 62 | 1119 | ACAUCCGCCGUAAAAGAAU | 261 |
| 1119 | UGGCGGCAACCGGAACAAC | 63 | 1119 | UGGCGGCAACCGGAACAAC | 63 | 1137 | GUUGUUCCGGUUGCCGCCA | 262 |
| 1137 | CUUUGACACAGAAGAGUAC | 64 | 1137 | CUUUGACACAGAAGAGUAC | 64 | 1155 | GUACUCUUCUGUGUCAAAG | 263 |
| 1155 | CUGCAUGGCCGUGUGUGGC | 65 | 1155 | CUGCAUGGCCGUGUGUGGC | 65 | 1173 | GCCACACACGGCCAUGCAG | 264 |
| 1173 | CAGCGCCAUGUCCCAAAGU | 66 | 1173 | CAGCGCCAUGUCCCAAAGU | 66 | 1191 | ACUUUGGGACAUGGCGCUG | 265 |
| 1191 | UUUACUCAAGACUACCCAG | 67 | 1191 | UUUACUCAAGACUACCCAG | 67 | 1209 | CUGGGUAGUCUUGAGUAAA | 266 |
| 1209 | GGAACCUCUUGCCCGAGAU | 68 | 1209 | GGAACCUCUUGCCCGAGAU | 68 | 1227 | AUCUCGGGCAAGAGGUUCC | 267 |
| 1227 | UCCUGUUAAACUUCCUACA | 69 | 1227 | UCCUGUUAAACUUCCUACA | 69 | 1245 | UGUAGGAAGUUUAACAGGA | 268 |
| 1245 | AACAGCAGCCAGUACCCCU | 70 | 1245 | AACAGCAGCCAGUACCCCU | 70 | 1263 | AGGGGUACUGGCUGCUGUU | 269 |
| 1263 | UGAUGCCGUUGACAAGUAU | 71 | 1263 | UGAUGCCGUUGACAAGUAU | 71 | 1281 | AUACUUGUCAACGGCAUCA | 270 |
| 1281 | UCUCGAGACACCUGGGGAU | 72 | 1281 | UCUCGAGACACCUGGGGAU | 72 | 1299 | AUCCCCAGGUGUCUCGAGA | 271 |
| 1299 | UGAGAAUGAACAUGCCCAU | 73 | 1299 | UGAGAAUGAACAUGCCCAU | 73 | 1317 | AUGGGCAUGUUCAUUCUCA | 272 |
| 1317 | UUUCCAGAAAGCCAAAGAG | 74 | 1317 | UUUCCAGAAAGCCAAAGAG | 74 | 1335 | CUCUUUGGCUUUCUGGAAA | 273 |
| 1335 | GAGGCUUGAGGCCAAGCAC | 75 | 1335 | GAGGCUUGAGGCCAAGCAC | 75 | 1353 | GUGCUUGGCCUCAAGCCUC | 274 |
| 1353 | CCGAGAGAGAAUGUCCCAG | 76 | 1353 | CCGAGAGAGAAUGUCCCAG | 76 | 1371 | CUGGGACAUUCUCUCUCGG | 275 |
| 1371 | GGUCAUGAGAGAAUGGGAA | 77 | 1371 | GGUCAUGAGAGAAUGGGAA | 77 | 1389 | UUCCCAUUCUCUCAUGACC | 276 |
| 1389 | AGAGGCAGAACGUCAAGCA | 78 | 1389 | AGAGGCAGAACGUCAAGCA | 78 | 1407 | UGCUUGACGUUCUGCCUCU | 277 |
| 1407 | AAAGAACUUGCCUAAAGCU | 79 | 1407 | AAAGAACUUGCCUAAAGCU | 79 | 1425 | AGCUUUAGGCAAGUUCUUU | 278 |
| 1425 | UGAUAAGAAGGCAGUUAUC | 80 | 1425 | UGAUAAGAAGGCAGUUAUC | 80 | 1443 | GAUAACUGCCUUCUUAUCA | 279 |
| 1443 | CCAGCAUUUCCAGGAGAAA | 81 | 1443 | CCAGCAUUUCCAGGAGAAA | 81 | 1461 | UUUCUCCUGGAAAUGCUGG | 280 |
| 1461 | AGUGGAAUCUUUGGAACAG | 82 | 1461 | AGUGGAAUCUUUGGAACAG | 82 | 1479 | CUGUUCCAAAGAUUCCACU | 281 |
| 1479 | GGAAGCAGCCAACGAGAGA | 83 | 1479 | GGAAGCAGCCAACGAGAGA | 83 | 1497 | UCUCUCGUUGGCUGCUUCC | 282 |
| 1497 | ACAGCAGCUGGUGGAGACA | 84 | 1497 | ACAGCAGCUGGUGGAGACA | 84 | 1515 | UGUCUCCACCAGCUGCUGU | 283 |
| 1515 | ACACAUGGCCAGAGUGGAA | 85 | 1515 | ACACAUGGCCAGAGUGGAA | 85 | 1533 | UUCCACUCUGGCCAUGUGU | 284 |
| 1533 | AGCCAUGCUCAAUGACCGC | 86 | 1533 | AGCCAUGCUCAAUGACCGC | 86 | 1551 | GCGGUCAUUGAGCAUGGCU | 285 |
| 1551 | CCGCCGCCUGGCCCUGGAG | 87 | 1551 | CCGCCGCCUGGCCCUGGAG | 87 | 1569 | CUCCAGGGCCAGGCGGCGG | 286 |
| 1569 | GAACUACAUCACCGCUCUG | 88 | 1569 | GAACUACAUCACCGCUCUG | 88 | 1587 | CAGAGCGGUGAUGUAGUUC | 287 |
| 1587 | GCAGGCUGUUCCUCCUCGG | 89 | 1587 | GCAGGCUGUUCCUCCUCGG | 89 | 1605 | CCGAGGAGGAACAGCCUGC | 288 |
| 1605 | GCCUCGUCACGUGUUCAAU | 90 | 1605 | GCCUCGUCACGUGUUCAAU | 90 | 1623 | AUUGAACACGUGACGAGGC | 289 |
| 1623 | UAUGCUAAAGAAGUAUGUC | 91 | 1623 | UAUGCUAAAGAAGUAUGUC | 91 | 1641 | GACAUACUUCUUUAGCAUA | 290 |
| 1641 | CCGCGCAGAACAGAAGGAC | 92 | 1641 | CCGCGCAGAACAGAAGGAC | 92 | 1659 | GUCCUUCUGUUCUGCGCGG | 291 |
| 1659 | CAGACAGCACACCCUAAAG | 93 | 1659 | CAGACAGCACACCCUAAAG | 93 | 1677 | CUUUAGGGUGUGCUGUCUG | 292 |
| 1677 | GCAUUUCGAGCAUGUGCGC | 94 | 1677 | GCAUUUCGAGCAUGUGCGC | 94 | 1695 | GCGCACAUGCUCGAAAUGC | 293 |
| 1695 | CAUGGUGGAUCCCAAGAAA | 95 | 1695 | CAUGGUGGAUCCCAAGAAA | 95 | 1713 | UUUCUUGGGAUCCACCAUG | 294 |
| 1713 | AGCCGCUCAGAUCCGGUCC | 96 | 1713 | AGCCGCUCAGAUCCGGUCC | 96 | 1731 | GGACCGGAUCUGAGCGGCU | 295 |
| 1731 | CCAGGUUAUGACACACCUC | 97 | 1731 | CCAGGUUAUGACACACCUC | 97 | 1749 | GAGGUGUGUCAUAACCUGG | 296 |
| 1749 | CCGUGUGAUUUAUGAGCGC | 98 | 1749 | CCGUGUGAUUUAUGAGCGC | 98 | 1767 | GCGCUCAUAAAUCACACGG | 297 |
| 1767 | CAUGAAUCAGUCUCUCUCC | 99 | 1767 | CAUGAAUCAGUCUCUCUCC | 99 | 1785 | GGAGAGAGACUGAUUCAUG | 298 |
| 1785 | CCUGCUCUACAACGUGCCU | 100 | 1785 | CCUGCUCUACAACGUGCCU | 100 | 1803 | AGGCACGUUGUAGAGCAGG | 299 |
| 1803 | UGCAGUGGCCGAGGAGAUU | 101 | 1803 | UGCAGUGGCCGAGGAGAUU | 101 | 1821 | AAUCUCCUCGGCCACUGCA | 300 |
| 1821 | UCAGGAUGAAGUUGAUGAG | 102 | 1821 | UCAGGAUGAAGUUGAUGAG | 102 | 1839 | CUCAUCAACUUCAUCCUGA | 301 |
| 1839 | GCUGCUUCAGAAAGAGCAA | 103 | 1839 | GCUGCUUCAGAAAGAGCAA | 103 | 1857 | UUGCUCUUUCUGAAGCAGC | 302 |
| 1857 | AAACUAUUCAGAUGACGUC | 104 | 1857 | AAACUAUUCAGAUGACGUC | 104 | 1875 | GACGUCAUCUGAAUAGUUU | 303 |
| 1875 | CUUGGCCAACAUGAUUAGU | 105 | 1875 | CUUGGCCAACAUGAUUAGU | 105 | 1893 | ACUAAUCAUGUUGGCCAAG | 304 |
| 1893 | UGAACCAAGGAUCAGUUAC | 106 | 1893 | UGAACCAAGGAUCAGUUAC | 106 | 1911 | GUAACUGAUCCUUGGUUCA | 305 |
| 1911 | CGGAAACGAUGCUCUCAUG | 107 | 1911 | CGGAAACGAUGCUCUCAUG | 107 | 1929 | CAUGAGAGCAUCGUUUCCG | 306 |
| 1929 | GCCAUCUUUGACCGAAACG | 108 | 1929 | GCCAUCUUUGACCGAAACG | 108 | 1947 | CGUUUCGGUCAAAGAUGGC | 307 |
| 1947 | GAAAACCACCGUGGAGCUC | 109 | 1947 | GAAAACCACCGUGGAGCUC | 109 | 1965 | GAGCUCCACGGUGGUUUUC | 308 |
| 1965 | CCUUCCCGUGAAUGGAGAG | 110 | 1965 | CCUUCCCGUGAAUGGAGAG | 110 | 1983 | CUCUCCAUUCACGGGAAGG | 309 |
| 1983 | GUUCAGCCUGGACGAUCUC | 111 | 1983 | GUUCAGCCUGGACGAUCUC | 111 | 2001 | GAGAUCGUCCAGGCUGAAC | 310 |
| 2001 | CCAGCCGUGGCAUUCUUUU | 112 | 2001 | CCAGCCGUGGCAUUCUUUU | 112 | 2019 | AAAAGAAUGCCACGGCUGG | 311 |
| 2019 | UGGGGCUGACUCUGUGCCA | 113 | 2019 | UGGGGCUGACUCUGUGCCA | 113 | 2037 | UGGCACAGAGUCAGCCCCA | 312 |
| 2037 | AGCCAACACAGAAAACGAA | 114 | 2037 | AGCCAACACAGAAAACGAA | 114 | 2055 | UUCGUUUUCUGUGUUGGCU | 313 |
| 2055 | AGUUGAGCCUGUUGAUGCC | 115 | 2055 | AGUUGAGCCUGUUGAUGCC | 115 | 2073 | GGCAUCAACAGGCUCAACU | 314 |
| 2073 | CCGCCCUGCUGCCGACCGA | 116 | 2073 | CCGCCCUGCUGCCGACCGA | 116 | 2091 | UCGGUCGGCAGCAGGGCGG | 315 |
| 2091 | AGGACUGACCACUCGACCA | 117 | 2091 | AGGACUGACCACUCGACCA | 117 | 2109 | UGGUCGAGUGGUCAGUCCU | 316 |
| 2109 | AGGUUCUGGGUUGACAAAU | 118 | 2109 | AGGUUCUGGGUUGACAAAU | 118 | 2127 | AUUUGUCAACCCAGAACCU | 317 |
| 2127 | UAUCAAGACGGAGGAGAUC | 119 | 2127 | UAUCAAGACGGAGGAGAUC | 119 | 2145 | GAUCUCCUCCGUCUUGAUA | 318 |
| 2145 | CUCUGAAGUGAAGAUGGAU | 120 | 2145 | CUCUGAAGUGAAGAUGGAU | 120 | 2163 | AUCCAUCUUCACUUCAGAG | 319 |
| 2163 | UGCAGAAUUCCGACAUGAC | 121 | 2163 | UGCAGAAUUCCGACAUGAC | 121 | 2181 | GUCAUGUCGGAAUUCUGCA | 320 |
| 2181 | CUCAGGAUAUGAAGUUCAU | 122 | 2181 | CUCAGGAUAUGAAGUUCAU | 122 | 2199 | AUGAACUUCAUAUCCUGAG | 321 |
| 2199 | UCAUCAAAAAUUGGUGUUC | 123 | 2199 | UCAUCAAAAAUUGGUGUUC | 123 | 2217 | GAACACCAAUUUUUGAUGA | 322 |
| 2217 | CUUUGCAGAAGAUGUGGGU | 124 | 2217 | CUUUGCAGAAGAUGUGGGU | 124 | 2235 | ACCCACAUCUUCUGCAAAG | 323 |
| 2235 | UUCAAACAAAGGUGCAAUC | 125 | 2235 | UUCAAACAAAGGUGCAAUC | 125 | 2253 | GAUUGCACCUUUGUUUGAA | 324 |
| 2253 | CAUUGGACUCAUGGUGGGC | 126 | 2253 | CAUUGGACUCAUGGUGGGC | 126 | 2271 | GCCCACCAUGAGUCCAAUG | 325 |
| 2271 | CGGUGUUGUCAUAGCGACA | 127 | 2271 | CGGUGUUGUCAUAGCGACA | 127 | 2289 | UGUCGCUAUGACAACACCG | 326 |
| 2289 | AGUGAUCGUCAUCACCUUG | 128 | 2289 | AGUGAUCGUCAUCACCUUG | 128 | 2307 | CAAGGUGAUGACGAUCACU | 327 |
| 2307 | GGUGAUGCUGAAGAAGAAA | 129 | 2307 | GGUGAUGCUGAAGAAGAAA | 129 | 2325 | UUUCUUCUUCAGCAUCACC | 328 |
| 2325 | ACAGUACACAUCCAUUCAU | 130 | 2325 | ACAGUACACAUCCAUUCAU | 130 | 2343 | AUGAAUGGAUGUGUACUGU | 329 |
| 2343 | UCAUGGUGUGGUGGAGGUU | 131 | 2343 | UCAUGGUGUGGUGGAGGUU | 131 | 2361 | AACCUCCACCACACCAUGA | 330 |
| 2361 | UGACGCCGCUGUCACCCCA | 132 | 2361 | UGACGCCGCUGUCACCCCA | 132 | 2379 | UGGGGUGACAGCGGCGUCA | 331 |
| 2379 | AGAGGAGCGCCACCUGUCC | 133 | 2379 | AGAGGAGCGCCACCUGUCC | 133 | 2397 | GGACAGGUGGCGCUCCUCU | 332 |
| 2397 | CAAGAUGCAGCAGAACGGC | 134 | 2397 | CAAGAUGCAGCAGAACGGC | 134 | 2415 | GCCGUUCUGCUGCAUCUUG | 333 |
| 2415 | CUACGAAAAUCCAACCUAC | 135 | 2415 | CUACGAAAAUCCAACCUAC | 135 | 2433 | GUAGGUUGGAUUUUCGUAG | 334 |
| 2433 | CAAGUUCUUUGAGCAGAUG | 136 | 2433 | CAAGUUCUUUGAGCAGAUG | 136 | 2451 | CAUCUGCUCAAAGAACUUG | 335 |
| 2451 | GCAGAACUAGACCCCCGCC | 137 | 2451 | GCAGAACUAGACCCCCGCC | 137 | 2469 | GGCGGGGGUCUAGUUCUGC | 336 |
| 2469 | CACAGCAGCCUCUGAAGUU | 138 | 2469 | CACAGCAGCCUCUGAAGUU | 138 | 2487 | AACUUCAGAGGCUGCUGUG | 337 |
| 2487 | UGGACAGCAAAACCAUUGC | 139 | 2487 | UGGACAGCAAAACCAUUGC | 139 | 2505 | GCAAUGGUUUUGCUGUCCA | 338 |
| 2505 | CUUCACUACCCAUCGGUGU | 140 | 2505 | CUUCACUACCCAUCGGUGU | 140 | 2523 | ACACCGAUGGGUAGUGAAG | 339 |
| 2523 | UCCAUUUAUAGAAUAAUGU | 141 | 2523 | UCCAUUUAUAGAAUAAUGU | 141 | 2541 | ACAUUAUUCUAUAAAUGGA | 340 |
| 2541 | UGGGAAGAAACAAACCCGU | 142 | 2541 | UGGGAAGAAACAAACCCGU | 142 | 2559 | ACGGGUUUGUUUCUUCCCA | 341 |
| 2559 | UUUUAUGAUUUACUCAUUA | 143 | 2559 | UUUUAUGAUUUACUCAUUA | 143 | 2577 | UAAUGAGUAAAUCAUAAAA | 342 |
| 2577 | AUCGCCUUUUGACAGCUGU | 144 | 2577 | AUCGCCUUUUGACAGCUGU | 144 | 2595 | ACAGCUGUCAAAAGGCGAU | 343 |
| 2595 | UGCUGUAACACAAGUAGAU | 145 | 2595 | UGCUGUAACACAAGUAGAU | 145 | 2613 | AUCUACUUGUGUUACAGCA | 344 |
| 2613 | UGCCUGAACUUGAAUUAAU | 146 | 2613 | UGCCUGAACUUGAAUUAAU | 146 | 2631 | AUUAAUUCAAGUUCAGGCA | 345 |
| 2631 | UCCACACAUCAGUAAUGUA | 147 | 2631 | UCCACACAUCAGUAAUGUA | 147 | 2649 | UACAUUACUGAUGUGUGGA | 346 |
| 2649 | AUUCUAUCUCUCUUUACAU | 148 | 2649 | AUUCUAUCUCUCUUUACAU | 148 | 2667 | AUGUAAAGAGAGAUAGAAU | 347 |
| 2667 | UUUUGGUCUCUAUACUACA | 149 | 2667 | UUUUGGUCUCUAUACUACA | 149 | 2685 | UGUAGUAUAGAGACCAAAA | 348 |
| 2685 | AUUAUUAAUGGGUUUUGUG | 150 | 2685 | AUUAUUAAUGGGUUUUGUG | 150 | 2703 | CACAAAACCCAUUAAUAAU | 349 |
| 2703 | GUACUGUAAAGAAUUUAGC | 151 | 2703 | GUACUGUAAAGAAUUUAGC | 151 | 2721 | GCUAAAUUCUUUACAGUAC | 350 |
| 2721 | CUGUAUCAAACUAGUGCAU | 152 | 2721 | CUGUAUCAAACUAGUGCAU | 152 | 2739 | AUGCACUAGUUUGAUACAG | 351 |
| 2739 | UGAAUAGAUUCUCUCCUGA | 153 | 2739 | UGAAUAGAUUCUCUCCUGA | 153 | 2757 | UCAGGAGAGAAUCUAUUCA | 352 |
| 2757 | AUUAUUUAUCACAUAGCCC | 154 | 2757 | AUUAUUUAUCACAUAGCCC | 154 | 2775 | GGGCUAUGUGAUAAAUAAU | 353 |
| 2775 | CCUUAGCCAGUUGUAUAUU | 155 | 2775 | CCUUAGCCAGUUGUAUAUU | 155 | 2793 | AAUAUACAACUGGCUAAGG | 354 |
| 2793 | UAUUCUUGUGGUUUGUGAC | 156 | 2793 | UAUUCUUGUGGUUUGUGAC | 156 | 2811 | GUCACAAACCACAAGAAUA | 355 |
| 2811 | CCCAAUUAAGUCCUACUUU | 157 | 2811 | CCCAAUUAAGUCCUACUUU | 157 | 2829 | AAAGUAGGACUUAAUUGGG | 356 |
| 2829 | UACAUAUGCUUUAAGAAUC | 158 | 2829 | UACAUAUGCUUUAAGAAUC | 158 | 2847 | GAUUCUUAAAGCAUAUGUA | 357 |
| 2847 | CGAUGGGGGAUGCUUCAUG | 159 | 2847 | CGAUGGGGGAUGCUUCAUG | 159 | 2865 | CAUGAAGCAUCCCCCAUCG | 358 |
| 2865 | GUGAACGUGGGAGUUCAGC | 160 | 2865 | GUGAACGUGGGAGUUCAGC | 160 | 2883 | GCUGAACUCCCACGUUCAC | 359 |
| 2883 | CUGCUUCUCUUGCCUAAGU | 161 | 2883 | CUGCUUCUCUUGCCUAAGU | 161 | 2901 | ACUUAGGCAAGAGAAGCAG | 360 |
| 2901 | UAUUCCUUUCCUGAUCACU | 162 | 2901 | UAUUCCUUUCCUGAUCACU | 162 | 2919 | AGUGAUCAGGAAAGGAAUA | 361 |
| 2919 | UAUGCAUUUUAAAGUUAAA | 163 | 2919 | UAUGCAUUUUAAAGUUAAA | 163 | 2937 | UUUAACUUUAAAAUGCAUA | 362 |
| 2937 | ACAUUUUUAAGUAUUUCAG | 164 | 2937 | ACAUUUUUAAGUAUUUCAG | 164 | 2955 | CUGAAAUACUUAAAAAUGU | 363 |
| 2955 | GAUGCUUUAGAGAGAUUUU | 165 | 2955 | GAUGCUUUAGAGAGAUUUU | 165 | 2973 | AAAAUCUCUCUAAAGCAUC | 364 |
| 2973 | UUUUUCCAUGACUGCAUUU | 166 | 2973 | UUUUUCCAUGACUGCAUUU | 166 | 2991 | AAAUGCAGUCAUGGAAAAA | 365 |
| 2991 | UUACUGUACAGAUUGCUGC | 167 | 2991 | UUACUGUACAGAUUGCUGC | 167 | 3009 | GCAGCAAUCUGUACAGUAA | 366 |
| 3009 | CUUCUGCUAUAUUUGUGAU | 168 | 3009 | CUUCUGCUAUAUUUGUGAU | 168 | 3027 | AUCACAAAUAUAGCAGAAG | 367 |
| 3027 | UAUAGGAAUUAAGAGGAUA | 169 | 3027 | UAUAGGAAUUAAGAGGAUA | 169 | 3045 | UAUCCUCUUAAUUCCUAUA | 368 |
| 3045 | ACACACGUUUGUUUCUUCG | 170 | 3045 | ACACACGUUUGUUUCUUCG | 170 | 3063 | CGAAGAAACAAACGUGUGU | 369 |
| 3063 | GUGCCUGUUUUAUGUGCAC | 171 | 3063 | GUGCCUGUUUUAUGUGCAC | 171 | 3081 | GUGCACAUAAAACAGGCAC | 370 |
| 3081 | CACAUUAGGCAUUGAGACU | 172 | 3081 | CACAUUAGGCAUUGAGACU | 172 | 3099 | AGUCUCAAUGCCUAAUGUG | 371 |
| 3099 | UUCAAGCUUUUCUUUUUUU | 173 | 3099 | UUCAAGCUUUUCUUUUUUU | 173 | 3117 | AAAAAAAGAAAAGCUUGAA | 372 |
| 3117 | UGUCCACGUAUCUUUGGGU | 174 | 3117 | UGUCCACGUAUCUUUGGGU | 174 | 3135 | ACCCAAAGAUACGUGGACA | 373 |
| 3135 | UCUUUGAUAAAGAAAAGAA | 175 | 3135 | UCUUUGAUAAAGAAAAGAA | 175 | 3153 | UUCUUUUCUUUAUCAAAGA | 374 |
| 3153 | AUCCCUGUUCAUUGUAAGC | 176 | 3153 | AUCCCUGUUCAUUGUAAGC | 176 | 3171 | GCUUACAAUGAACAGGGAU | 375 |
| 3171 | CACUUUUACGGGGCGGGUG | 177 | 3171 | CACUUUUACGGGGCGGGUG | 177 | 3189 | CACCCGCCCCGUAAAAGUG | 376 |
| 3189 | GGGGAGGGGUGCUCUGCUG | 178 | 3189 | GGGGAGGGGUGCUCUGCUG | 178 | 3207 | CAGCAGAGCACCCCUCCCC | 377 |
| 3207 | GGUCUUCAAUUACCAAGAA | 179 | 3207 | GGUCUUCAAUUACCAAGAA | 179 | 3225 | UUCUUGGUAAUUGAAGACC | 378 |
| 3225 | AUUCUCCAAAACAAUUUUC | 180 | 3225 | AUUCUCCAAAACAAUUUUC | 180 | 3243 | GAAAAUUGUUUUGGAGAAU | 379 |
| 3243 | CUGCAGGAUGAUUGUACAG | 181 | 3243 | CUGCAGGAUGAUUGUACAG | 181 | 3261 | CUGUACAAUCAUCCUGCAG | 380 |
| 3261 | GAAUCAUUGCUUAUGACAU | 182 | 3261 | GAAUCAUUGCUUAUGACAU | 182 | 3279 | AUGUCAUAAGCAAUGAUUC | 381 |
| 3279 | UGAUCGCUUUCUACACUGU | 183 | 3279 | UGAUCGCUUUCUACACUGU | 183 | 3297 | ACAGUGUAGAAAGCGAUCA | 382 |
| 3297 | UAUUACAUAAAUAAAUUAA | 184 | 3297 | UAUUACAUAAAUAAAUUAA | 184 | 3315 | UUAAUUUAUUUAUGUAAUA | 383 |
| 3315 | AAUAAAAUAACCCCGGGCA | 185 | 3315 | AAUAAAAUAACCCCGGGCA | 185 | 3333 | UGCCCGGGGUUAUUUUAUU | 384 |
| 3333 | AAGACUUUUCUUUGAAGGA | 186 | 3333 | AAGACUUUUCUUUGAAGGA | 186 | 3351 | UCCUUCAAAGAAAAGUCUU | 385 |
| 3351 | AUGACUACAGACAUUAAAU | 187 | 3351 | AUGACUACAGACAUUAAAU | 187 | 3369 | AUUUAAUGUCUGUAGUCAU | 386 |
| 3369 | UAAUCGAAGUAAUUUUGGG | 188 | 3369 | UAAUCGAAGUAAUUUUGGG | 188 | 3387 | CCCAAAAUUACUUCGAUUA | 387 |
| 3387 | GUGGGGAGAAGAGGCAGAU | 189 | 3387 | GUGGGGAGAAGAGGCAGAU | 189 | 3405 | AUCUGCCUCUUCUCCCCAC | 388 |
| 3405 | UUCAAUUUUCUUUAACCAG | 190 | 3405 | UUCAAUUUUCUUUAACCAG | 190 | 3423 | CUGGUUAAAGAAAAUUGAA | 389 |
| 3423 | GUCUGAAGUUUCAUUUAUG | 191 | 3423 | GUCUGAAGUUUCAUUUAUG | 191 | 3441 | CAUAAAUGAAACUUCAGAC | 390 |
| 3441 | GAUACAAAAGAAGAUGAAA | 192 | 3441 | GAUACAAAAGAAGAUGAAA | 192 | 3459 | UUUCAUCUUCUUUUGUAUC | 391 |
| 3459 | AAUGGAAGUGGCAAUAUAA | 193 | 3459 | AAUGGAAGUGGCAAUAUAA | 193 | 3477 | UUAUAUUGCCACUUCCAUU | 392 |
| 3477 | AGGGGAUGAGGAAGGCAUG | 194 | 3477 | AGGGGAUGAGGAAGGCAUG | 194 | 3495 | CAUGCCUUCCUCAUCCCCU | 393 |
| 3495 | GCCUGGACAAACCCUUCUU | 195 | 3495 | GCCUGGACAAACCCUUCUU | 195 | 3513 | AAGAAGGGUUUGUCCAGGC | 394 |
| 3513 | UUUAAGAUGUGUCUUCAAU | 196 | 3513 | UUUAAGAUGUGUCUUCAAU | 196 | 3531 | AUUGAAGACACAUCUUAAA | 395 |
| 3531 | UUUGUAUAAAAUGGUGUUU | 197 | 3531 | UUUGUAUAAAAUGGUGUUU | 197 | 3549 | AAACACCAUUUUAUACAAA | 396 |
| 3549 | UUCAUGUAAAUAAAUACAU | 198 | 3549 | UUCAUGUAAAUAAAUACAU | 198 | 3567 | AUGUAUUUAUUUACAUGAA | 397 |
| 3559 | UAAAUACAUUCUUGGAGGA | 199 | 3559 | UAAAUACAUUCUUGGAGGA | 199 | 3577 | UCCUCCAAGAAUGUAUUUA | 398 |

BACE NM_012104

| | | | | | | | | |
|---|---|---|---|---|---|---|---|---|
| 1 | CGCACUCGUCCCCAGCCCG | 399 | 1 | CGCACUCGUCCCCAGCCCG | 399 | 19 | CGGGCUGGGGACGAGUGCG | 724 |
| 19 | GCCCGGGAGCUGCGAGCCG | 400 | 19 | GCCCGGGAGCUGCGAGCCG | 400 | 37 | CGGCUCGCAGCUCCCGGGC | 725 |
| 37 | GCGAGCUGGAUUAUGGUGG | 401 | 37 | GCGAGCUGGAUUAUGGUGG | 401 | 55 | CCACCAUAAUCCAGCUCGC | 726 |
| 55 | GCCUGAGCAGCCAACGCAG | 402 | 55 | GCCUGAGCAGCCAACGCAG | 402 | 73 | CUGCGUUGGCUGCUCAGGC | 727 |
| 73 | GCCGCAGGAGCCCGGAGCC | 403 | 73 | GCCGCAGGAGCCCGGAGCC | 403 | 91 | GGCUCCGGGCUCCUGCGGC | 728 |
| 91 | CCUUGCCCCUGCCCGCGCC | 404 | 91 | CCUUGCCCCUGCCCGCGCC | 404 | 109 | GGCGCGGGCAGGGGCAAGG | 729 |
| 109 | CGCCGCCCGCCGGGGGGAC | 405 | 109 | CGCCGCCCGCCGGGGGGAC | 405 | 127 | GUCCCCCCGGCGGGCGGCG | 730 |
| 127 | CCAGGGAAGCCGCCACCGG | 406 | 127 | CCAGGGAAGCCGCCACCGG | 406 | 145 | CCGGUGGCGGCUUCCCUGG | 731 |
| 145 | GCCCGCCAUGCCCGCCCCU | 407 | 145 | GCCCGCCAUGCCCGCCCCU | 407 | 163 | AGGGGCGGGCAUGGCGGGC | 732 |
| 163 | UCCCAGCCCCGCCGGGAGC | 408 | 163 | UCCCAGCCCCGCCGGGAGC | 408 | 181 | GCUCCCGGCGGGGCUGGGA | 733 |
| 181 | CCCGCGCCCGCUGCCCAGG | 409 | 181 | CCCGCGCCCGCUGCCCAGG | 409 | 199 | CCUGGGCAGCGGGCGCGGG | 734 |
| 199 | GCUGGCCGCCGCCGUGCCG | 410 | 199 | GCUGGCCGCCGCCGUGCCG | 410 | 217 | CGGCACGGCGGCGGCCAGC | 735 |
| 217 | GAUGUAGCGGGCUCCGGAU | 411 | 217 | GAUGUAGCGGGCUCCGGAU | 411 | 235 | AUCCGGAGCCCGCUACAUC | 736 |
| 235 | UCCCAGCCUCUCCCCUGCU | 412 | 235 | UCCCAGCCUCUCCCCUGCU | 412 | 253 | AGCAGGGGAGAGGCUGGGA | 737 |
| 253 | UCCCGUGCUCUGCGGAUCU | 413 | 253 | UCCCGUGCUCUGCGGAUCU | 413 | 271 | AGAUCCGCAGAGCACGGGA | 738 |
| 271 | UCCCCUGACCGCUCUCCAC | 414 | 271 | UCCCCUGACCGCUCUCCAC | 414 | 289 | GUGGAGAGCGGUCAGGGGA | 739 |
| 289 | CAGCCCGGACCCGGGGGCU | 415 | 289 | CAGCCCGGACCCGGGGGCU | 415 | 307 | AGCCCCCGGGUCCGGGCUG | 740 |
| 307 | UGGCCCAGGGCCCUGCAGG | 416 | 307 | UGGCCCAGGGCCCUGCAGG | 416 | 325 | CCUGCAGGGCCCUGGGCCA | 741 |
| 325 | GCCCUGGCGUCCUGAUGCC | 417 | 325 | GCCCUGGCGUCCUGAUGCC | 417 | 343 | GGCAUCAGGACGCCAGGGC | 742 |
| 343 | CCCCAAGCUCCCUCUCCUG | 418 | 343 | CCCCAAGCUCCCUCUCCUG | 418 | 361 | CAGGAGAGGGAGCUUGGGG | 743 |
| 361 | GAGAAGCCACCAGCACCAC | 419 | 361 | GAGAAGCCACCAGCACCAC | 419 | 379 | GUGGUGCUGGUGGCUUCUC | 744 |
| 379 | CCCAGACUUGGGGGCAGGC | 420 | 379 | CCCAGACUUGGGGGCAGGC | 420 | 397 | GCCUGCCCCCAAGUCUGGG | 745 |
| 397 | CGCCAGGGACGGACGUGGG | 421 | 397 | CGCCAGGGACGGACGUGGG | 421 | 415 | CCCACGUCCGUCCCUGGCG | 746 |
| 415 | GCCAGUGCGAGCCCAGAGG | 422 | 415 | GCCAGUGCGAGCCCAGAGG | 422 | 433 | CCUCUGGGCUCGCACUGGC | 747 |
| 433 | GGCCCGAAGGCCGGGGCCC | 423 | 433 | GGCCCGAAGGCCGGGGCCC | 423 | 451 | GGGCCCCGGCCUUCGGGCC | 748 |
| 451 | CACCAUGGCCCAAGCCCUG | 424 | 451 | CACCAUGGCCCAAGCCCUG | 424 | 469 | CAGGGCUUGGGCCAUGGUG | 749 |
| 469 | GCCCUGGCUCCUGCUGUGG | 425 | 469 | GCCCUGGCUCCUGCUGUGG | 425 | 487 | CCACAGCAGGAGCCAGGGC | 750 |
| 487 | GAUGGGCGCGGGAGUGCUG | 426 | 487 | GAUGGGCGCGGGAGUGCUG | 426 | 505 | CAGCACUCCCGCGCCCAUC | 751 |
| 505 | GCCUGCCCACGGCACCCAG | 427 | 505 | GCCUGCCCACGGCACCCAG | 427 | 523 | CUGGGUGCCGUGGGCAGGC | 752 |
| 523 | GCACGGCAUCCGGCUGCCC | 428 | 523 | GCACGGCAUCCGGCUGCCC | 428 | 541 | GGGCAGCCGGAUGCCGUGC | 753 |
| 541 | CCUGCGCAGCGGCCUGGGG | 429 | 541 | CCUGCGCAGCGGCCUGGGG | 429 | 559 | CCCCAGGCCGCUGCGCAGG | 754 |
| 559 | GGGCGCCCCCCUGGGGCUG | 430 | 559 | GGGCGCCCCCCUGGGGCUG | 430 | 577 | CAGCCCCAGGGGGGCGCCC | 755 |
| 577 | GCGGCUGCCCCGGGAGACC | 431 | 577 | GCGGCUGCCCCGGGAGACC | 431 | 595 | GGUCUCCCGGGGCAGCCGC | 756 |
| 595 | CGACGAAGAGCCCGAGGAG | 432 | 595 | CGACGAAGAGCCCGAGGAG | 432 | 613 | CUCCUCGGGCUCUUCGUCG | 757 |
| 613 | GCCCGGCCGGAGGGGCAGC | 433 | 613 | GCCCGGCCGGAGGGGCAGC | 433 | 631 | GCUGCCCCUCCGGCCGGGC | 758 |
| 631 | CUUUGUGGAGAUGGUGGAC | 434 | 631 | CUUUGUGGAGAUGGUGGAC | 434 | 649 | GUCCACCAUCUCCACAAAG | 759 |
| 649 | CAACCUGAGGGGCAAGUCG | 435 | 649 | CAACCUGAGGGGCAAGUCG | 435 | 667 | CGACUUGCCCCUCAGGUUG | 760 |
| 667 | GGGGCAGGGCUACUACGUG | 436 | 667 | GGGGCAGGGCUACUACGUG | 436 | 685 | CACGUAGUAGCCCUGCCCC | 761 |
| 685 | GGAGAUGACCGUGGGCAGC | 437 | 685 | GGAGAUGACCGUGGGCAGC | 437 | 703 | GCUGCCCACGGUCAUCUCC | 762 |
| 703 | CCCCCCGCAGACGCUCAAC | 438 | 703 | CCCCCCGCAGACGCUCAAC | 438 | 721 | GUUGAGCGUCUGCGGGGGG | 763 |
| 721 | CAUCCUGGUGGAUACAGGC | 439 | 721 | CAUCCUGGUGGAUACAGGC | 439 | 739 | GCCUGUAUCCACCAGGAUG | 764 |
| 739 | CAGCAGUAACUUUGCAGUG | 440 | 739 | CAGCAGUAACUUUGCAGUG | 440 | 757 | CACUGCAAAGUUACUGCUG | 765 |
| 757 | GGGUGCUGCCCCCCACCCC | 441 | 757 | GGGUGCUGCCCCCCACCCC | 441 | 775 | GGGGUGGGGGGCAGCACCC | 766 |
| 775 | CUUCCUGCAUCGCUACUAC | 442 | 775 | CUUCCUGCAUCGCUACUAC | 442 | 793 | GUAGUAGCGAUGCAGGAAG | 767 |
| 793 | CCAGAGGCAGCUGUCCAGC | 443 | 793 | CCAGAGGCAGCUGUCCAGC | 443 | 811 | GCUGGACAGCUGCCUCUGG | 768 |
| 811 | CACAUACCGGGACCUCCGG | 444 | 811 | CACAUACCGGGACCUCCGG | 444 | 829 | CCGGAGGUCCCGGUAUGUG | 769 |
| 829 | GAAGGGUGUGUAUGUGCCC | 445 | 829 | GAAGGGUGUGUAUGUGCCC | 445 | 847 | GGGCACAUACACACCCUUC | 770 |
| 847 | CUACACCCAGGGCAAGUGG | 446 | 847 | CUACACCCAGGGCAAGUGG | 446 | 865 | CCACUUGCCCUGGGUGUAG | 771 |
| 865 | GGAAGGGGAGCUGGGCACC | 447 | 865 | GGAAGGGGAGCUGGGCACC | 447 | 883 | GGUGCCCAGCUCCCCUUCC | 772 |
| 883 | CGACCUGGUAAGCAUCCCC | 448 | 883 | CGACCUGGUAAGCAUCCCC | 448 | 901 | GGGGAUGCUUACCAGGUCG | 773 |
| 901 | CCAUGGCCCCAACGUCACU | 449 | 901 | CCAUGGCCCCAACGUCACU | 449 | 919 | AGUGACGUUGGGGCCAUGG | 774 |
| 919 | UGUGCGUGCCAACAUUGCU | 450 | 919 | UGUGCGUGCCAACAUUGCU | 450 | 937 | AGCAAUGUUGGCACGCACA | 775 |
| 937 | UGCCAUCACUGAAUCAGAC | 451 | 937 | UGCCAUCACUGAAUCAGAC | 451 | 955 | GUCUGAUUCAGUGAUGGCA | 776 |
| 955 | CAAGUUCUUCAUCAACGGC | 452 | 955 | CAAGUUCUUCAUCAACGGC | 452 | 973 | GCCGUUGAUGAAGAACUUG | 777 |
| 973 | CUCCAACUGGGAAGGCAUC | 453 | 973 | CUCCAACUGGGAAGGCAUC | 453 | 991 | GAUGCCUUCCCAGUUGGAG | 778 |
| 991 | CCUGGGGCUGGCCUAUGCU | 454 | 991 | CCUGGGGCUGGCCUAUGCU | 454 | 1009 | AGCAUAGGCCAGCCCCAGG | 779 |
| 1009 | UGAGAUUGCCAGGCCUGAC | 455 | 1009 | UGAGAUUGCCAGGCCUGAC | 455 | 1027 | GUCAGGCCUGGCAAUCUCA | 780 |
| 1027 | CGACUCCCUGGAGCCUUUC | 456 | 1027 | CGACUCCCUGGAGCCUUUC | 456 | 1045 | GAAAGGCUCCAGGGAGUCG | 781 |
| 1045 | CUUUGACUCUCUGGUAAAG | 457 | 1045 | CUUUGACUCUCUGGUAAAG | 457 | 1063 | CUUUACCAGAGAGUCAAAG | 782 |
| 1063 | GCAGACCCACGUUCCCAAC | 458 | 1063 | GCAGACCCACGUUCCCAAC | 458 | 1081 | GUUGGGAACGUGGGUCUGC | 783 |
| 1081 | CCUCUUCUCCCUGCAGCUU | 459 | 1081 | CCUCUUCUCCCUGCAGCUU | 459 | 1099 | AAGCUGCAGGGAGAAGAGG | 784 |
| 1099 | UUGUGGUGCUGGCUUCCCC | 460 | 1099 | UUGUGGUGCUGGCUUCCCC | 460 | 1117 | GGGGAAGCCAGCACCACAA | 785 |
| 1117 | CCUCAACCAGUCUGAAGUG | 461 | 1117 | CCUCAACCAGUCUGAAGUG | 461 | 1135 | CACUUCAGACUGGUUGAGG | 786 |
| 1135 | GCUGGCCUCUGUCGGAGGG | 462 | 1135 | GCUGGCCUCUGUCGGAGGG | 462 | 1153 | CCCUCCGACAGAGGCCAGC | 787 |
| 1153 | GAGCAUGAUCAUUGGAGGU | 463 | 1153 | GAGCAUGAUCAUUGGAGGU | 463 | 1171 | ACCUCCAAUGAUCAUGCUC | 788 |
| 1171 | UAUCGACCACUCGCUGUAC | 464 | 1171 | UAUCGACCACUCGCUGUAC | 464 | 1189 | GUACAGCGAGUGGUCGAUA | 789 |
| 1189 | CACAGGCAGUCUCUGGUAU | 465 | 1189 | CACAGGCAGUCUCUGGUAU | 465 | 1207 | AUACCAGAGACUGCCUGUG | 790 |
| 1207 | UACACCCAUCCGGCGGGAG | 466 | 1207 | UACACCCAUCCGGCGGGAG | 466 | 1225 | CUCCCGCCGGAUGGGUGUA | 791 |
| 1225 | GUGGUAUUAUGAGGUCAUC | 467 | 1225 | GUGGUAUUAUGAGGUCAUC | 467 | 1243 | GAUGACCUCAUAAUACCAC | 792 |
| 1243 | CAUUGUGCGGGUGGAGAUC | 468 | 1243 | CAUUGUGCGGGUGGAGAUC | 468 | 1261 | GAUCUCCACCCGCACAAUG | 793 |
| 1261 | CAAUGGACAGGAUCUGAAA | 469 | 1261 | CAAUGGACAGGAUCUGAAA | 469 | 1279 | UUUCAGAUCCUGUCCAUUG | 794 |
| 1279 | AAUGGACUGCAAGGAGUAC | 470 | 1279 | AAUGGACUGCAAGGAGUAC | 470 | 1297 | GUACUCCUUGCAGUCCAUU | 795 |
| 1297 | CAACUAUGACAAGAGCAUU | 471 | 1297 | CAACUAUGACAAGAGCAUU | 471 | 1315 | AAUGCUCUUGUCAUAGUUG | 796 |
| 1315 | UGUGGACAGUGGCACCACC | 472 | 1315 | UGUGGACAGUGGCACCACC | 472 | 1333 | GGUGGUGCCACUGUCCACA | 797 |
| 1333 | CAACCUUCGUUUGCCCAAG | 473 | 1333 | CAACCUUCGUUUGCCCAAG | 473 | 1351 | CUUGGGCAAACGAAGGUUG | 798 |
| 1351 | GAAAGUGUUUGAAGCUGCA | 474 | 1351 | GAAAGUGUUUGAAGCUGCA | 474 | 1369 | UGCAGCUUCAAACACUUUC | 799 |
| 1369 | AGUCAAAUCCAUCAAGGCA | 475 | 1369 | AGUCAAAUCCAUCAAGGCA | 475 | 1387 | UGCCUUGAUGGAUUUGACU | 800 |
| 1387 | AGCCUCCUCCACGGAGAAG | 476 | 1387 | AGCCUCCUCCACGGAGAAG | 476 | 1405 | CUUCUCCGUGGAGGAGGCU | 801 |
| 1405 | GUUCCCUGAUGGUUUCUGG | 477 | 1405 | GUUCCCUGAUGGUUUCUGG | 477 | 1423 | CCAGAAACCAUCAGGGAAC | 802 |
| 1423 | GCUAGGAGAGCAGCUGGUG | 478 | 1423 | GCUAGGAGAGCAGCUGGUG | 478 | 1441 | CACCAGCUGCUCUCCUAGC | 803 |
| 1441 | GUGCUGGCAAGCAGGCACC | 479 | 1441 | GUGCUGGCAAGCAGGCACC | 479 | 1459 | GGUGCCUGCUUGCCAGCAC | 804 |
| 1459 | CACCCCUUGGAACAUUUUC | 480 | 1459 | CACCCCUUGGAACAUUUUC | 480 | 1477 | GAAAAUGUUCCAAGGGGUG | 805 |
| 1477 | CCCAGUCAUCUCACUCUAC | 481 | 1477 | CCCAGUCAUCUCACUCUAC | 481 | 1495 | GUAGAGUGAGAUGACUGGG | 806 |
| 1495 | CCUAAUGGGUGAGGUUACC | 482 | 1495 | CCUAAUGGGUGAGGUUACC | 482 | 1513 | GGUAACCUCACCCAUUAGG | 807 |
| 1513 | CAACCAGUCCUUCCGCAUC | 483 | 1513 | CAACCAGUCCUUCCGCAUC | 483 | 1531 | GAUGCGGAAGGACUGGUUG | 808 |
| 1531 | CACCAUCCUUCCGCAGCAA | 484 | 1531 | CACCAUCCUUCCGCAGCAA | 484 | 1549 | UUGCUGCGGAAGGAUGGUG | 809 |
| 1549 | AUACCUGCGGCCAGUGGAA | 485 | 1549 | AUACCUGCGGCCAGUGGAA | 485 | 1567 | UUCCACUGGCCGCAGGUAU | 810 |
| 1567 | AGAUGUGGCCACGUCCCAA | 486 | 1567 | AGAUGUGGCCACGUCCCAA | 486 | 1585 | UUGGGACGUGGCCACAUCU | 811 |
| 1585 | AGACGACUGUUACAAGUUU | 487 | 1585 | AGACGACUGUUACAAGUUU | 487 | 1603 | AAACUUGUAACAGUCGUCU | 812 |
| 1603 | UGCCAUCUCACAGUCAUCC | 488 | 1603 | UGCCAUCUCACAGUCAUCC | 488 | 1621 | GGAUGACUGUGAGAUGGCA | 813 |
| 1621 | CACGGGCACUGUUAUGGGA | 489 | 1621 | CACGGGCACUGUUAUGGGA | 489 | 1639 | UCCCAUAACAGUGCCCGUG | 814 |
| 1639 | AGCUGUUAUCAUGGAGGGC | 490 | 1639 | AGCUGUUAUCAUGGAGGGC | 490 | 1657 | GCCCUCCAUGAUAACAGCU | 815 |
| 1657 | CUUCUACGUUGUCUUUGAU | 491 | 1657 | CUUCUACGUUGUCUUUGAU | 491 | 1675 | AUCAAAGACAACGUAGAAG | 816 |
| 1675 | UCGGGCCCGAAAACGAAUU | 492 | 1675 | UCGGGCCCGAAAACGAAUU | 492 | 1693 | AAUUCGUUUUCGGGCCCGA | 817 |
| 1693 | UGGCUUUGCUGUCAGCGCU | 493 | 1693 | UGGCUUUGCUGUCAGCGCU | 493 | 1711 | AGCGCUGACAGCAAAGCCA | 818 |
| 1711 | UUGCCAUGUGCACGAUGAG | 494 | 1711 | UUGCCAUGUGCACGAUGAG | 494 | 1729 | CUCAUCGUGCACAUGGCAA | 819 |
| 1729 | GUUCAGGACGGCAGCGGUG | 495 | 1729 | GUUCAGGACGGCAGCGGUG | 495 | 1747 | CACCGCUGCCGUCCUGAAC | 820 |
| 1747 | GGAAGGCCCUUUUGUCACC | 496 | 1747 | GGAAGGCCCUUUUGUCACC | 496 | 1765 | GGUGACAAAAGGGCCUUCC | 821 |
| 1765 | CUUGGACAUGGAAGACUGU | 497 | 1765 | CUUGGACAUGGAAGACUGU | 497 | 1783 | ACAGUCUUCCAUGUCCAAG | 822 |
| 1783 | UGGCUACAACAUUCCACAG | 498 | 1783 | UGGCUACAACAUUCCACAG | 498 | 1801 | CUGUGGAAUGUUGUAGCCA | 823 |
| 1801 | GACAGAUGAGUCAACCCUC | 499 | 1801 | GACAGAUGAGUCAACCCUC | 499 | 1819 | GAGGGUUGACUCAUCUGUC | 824 |
| 1819 | CAUGACCAUAGCCUAUGUC | 500 | 1819 | CAUGACCAUAGCCUAUGUC | 500 | 1837 | GACAUAGGCUAUGGUCAUG | 825 |
| 1837 | CAUGGCUGCCAUCUGCGCC | 501 | 1837 | CAUGGCUGCCAUCUGCGCC | 501 | 1855 | GGCGCAGAUGGCAGCCAUG | 826 |
| 1855 | CCUCUUCAUGCUGCCACUC | 502 | 1855 | CCUCUUCAUGCUGCCACUC | 502 | 1873 | GAGUGGCAGCAUGAAGAGG | 827 |
| 1873 | CUGCCUCAUGGUGUGUCAG | 503 | 1873 | CUGCCUCAUGGUGUGUCAG | 503 | 1891 | CUGACACACCAUGAGGCAG | 828 |
| 1891 | GUGGCGCUGCCUCCGCUGC | 504 | 1891 | GUGGCGCUGCCUCCGCUGC | 504 | 1909 | GCAGCGGAGGCAGCGCCAC | 829 |
| 1909 | CCUGCGCCAGCAGCAUGAU | 505 | 1909 | CCUGCGCCAGCAGCAUGAU | 505 | 1927 | AUCAUGCUGCUGGCGCAGG | 830 |
| 1927 | UGACUUUGCUGAUGACAUC | 506 | 1927 | UGACUUUGCUGAUGACAUC | 506 | 1945 | GAUGUCAUCAGCAAAGUCA | 831 |
| 1945 | CUCCCUGCUGAAGUGAGGA | 507 | 1945 | CUCCCUGCUGAAGUGAGGA | 507 | 1963 | UCCUCACUUCAGCAGGGAG | 832 |
| 1963 | AGGCCCAUGGGCAGAAGAU | 508 | 1963 | AGGCCCAUGGGCAGAAGAU | 508 | 1981 | AUCUUCUGCCCAUGGGCCU | 833 |
| 1981 | UAGAGAUUCCCCUGGACCA | 509 | 1981 | UAGAGAUUCCCCUGGACCA | 509 | 1999 | UGGUCCAGGGGAAUCUCUA | 834 |
| 1999 | ACACCUCCGUGGUUCACUU | 510 | 1999 | ACACCUCCGUGGUUCACUU | 510 | 2017 | AAGUGAACCACGGAGGUGU | 835 |
| 2017 | UUGGUCACAAGUAGGAGAC | 511 | 2017 | UUGGUCACAAGUAGGAGAC | 511 | 2035 | GUCUCCUACUUGUGACCAA | 836 |
| 2035 | CACAGAUGGCACCUGUGGC | 512 | 2035 | CACAGAUGGCACCUGUGGC | 512 | 2053 | GCCACAGGUGCCAUCUGUG | 837 |
| 2053 | CCAGAGCACCUCAGGACCC | 513 | 2053 | CCAGAGCACCUCAGGACCC | 513 | 2071 | GGGUCCUGAGGUGCUCUGG | 838 |
| 2071 | CUCCCCACCCACCAAAUGC | 514 | 2071 | CUCCCCACCCACCAAAUGC | 514 | 2089 | GCAUUUGGUGGGUGGGGAG | 839 |
| 2089 | CCUCUGCCUUGAUGGAGAA | 515 | 2089 | CCUCUGCCUUGAUGGAGAA | 515 | 2107 | UUCUCCAUCAAGGCAGAGG | 840 |
| 2107 | AGGAAAAGGCUGGCAAGGU | 516 | 2107 | AGGAAAAGGCUGGCAAGGU | 516 | 2125 | ACCUUGCCAGCCUUUUCCU | 841 |
| 2125 | UGGGUUCCAGGGACUGUAC | 517 | 2125 | UGGGUUCCAGGGACUGUAC | 517 | 2143 | GUACAGUCCCUGGAACCCA | 842 |
| 2143 | CCUGUAGGAAACAGAAAAG | 518 | 2143 | CCUGUAGGAAACAGAAAAG | 518 | 2161 | CUUUUCUGUUUCCUACAGG | 843 |
| 2161 | GAGAAGAAAGAAGCACUCU | 519 | 2161 | GAGAAGAAAGAAGCACUCU | 519 | 2179 | AGAGUGCUUCUUUCUUCUC | 844 |
| 2179 | UGCUGGCGGGAAUACUCUU | 520 | 2179 | UGCUGGCGGGAAUACUCUU | 520 | 2197 | AAGAGUAUUCCCGCCAGCA | 845 |
| 2197 | UGGUCACCUCAAAUUUAAG | 521 | 2197 | UGGUCACCUCAAAUUUAAG | 521 | 2215 | CUUAAAUUUGAGGUGACCA | 846 |
| 2215 | GUCGGGAAAUUCUGCUGCU | 522 | 2215 | GUCGGGAAAUUCUGCUGCU | 522 | 2233 | AGCAGCAGAAUUUCCCGAC | 847 |
| 2233 | UUGAAACUUCAGCCCUGAA | 523 | 2233 | UUGAAACUUCAGCCCUGAA | 523 | 2251 | UUCAGGGCUGAAGUUUCAA | 848 |
| 2251 | ACCUUUGUCCACCAUUCCU | 524 | 2251 | ACCUUUGUCCACCAUUCCU | 524 | 2269 | AGGAAUGGUGGACAAAGGU | 849 |
| 2269 | UUUAAAUUCUCCAACCCAA | 525 | 2269 | UUUAAAUUCUCCAACCCAA | 525 | 2287 | UUGGGUUGGAGAAUUUAAA | 850 |
| 2287 | AAGUAUUCUUCUUUUCUUA | 526 | 2287 | AAGUAUUCUUCUUUUCUUA | 526 | 2305 | UAAGAAAAGAAGAAUACUU | 851 |
| 2305 | AGUUUCAGAAGUACUGGCA | 527 | 2305 | AGUUUCAGAAGUACUGGCA | 527 | 2323 | UGCCAGUACUUCUGAAACU | 852 |
| 2323 | AUCACACGCAGGUUACCUU | 528 | 2323 | AUCACACGCAGGUUACCUU | 528 | 2341 | AAGGUAACCUGCGUGUGAU | 853 |
| 2341 | UGGCGUGUGUCCCUGUGGU | 529 | 2341 | UGGCGUGUGUCCCUGUGGU | 529 | 2359 | ACCACAGGGACACACGCCA | 854 |
| 2359 | UACCCUGGCAGAGAAGAGA | 530 | 2359 | UACCCUGGCAGAGAAGAGA | 530 | 2377 | UCUCUUCUCUGCCAGGGUA | 855 |
| 2377 | ACCAAGCUUGUUUCCCUGC | 531 | 2377 | ACCAAGCUUGUUUCCCUGC | 531 | 2395 | GCAGGGAAACAAGCUUGGU | 856 |
| 2395 | CUGGCCAAAGUCAGUAGGA | 532 | 2395 | CUGGCCAAAGUCAGUAGGA | 532 | 2413 | UCCUACUGACUUUGGCCAG | 857 |
| 2413 | AGAGGAUGCACAGUUUGCU | 533 | 2413 | AGAGGAUGCACAGUUUGCU | 533 | 2431 | AGCAAACUGUGCAUCCUCU | 858 |
| 2431 | UAUUUGCUUUAGAGACAGG | 534 | 2431 | UAUUUGCUUUAGAGACAGG | 534 | 2449 | CCUGUCUCUAAAGCAAAUA | 859 |
| 2449 | GGACUGUAUAAACAAGCCU | 535 | 2449 | GGACUGUAUAAACAAGCCU | 535 | 2467 | AGGCUUGUUUAUACAGUCC | 860 |
| 2467 | UAACAUUGGUGCAAAGAUU | 536 | 2467 | UAACAUUGGUGCAAAGAUU | 536 | 2485 | AAUCUUUGCACCAAUGUUA | 861 |
| 2485 | UGCCUCUUGAAUUAAAAAA | 537 | 2485 | UGCCUCUUGAAUUAAAAAA | 537 | 2503 | UUUUUUAAUUCAAGAGGCA | 862 |
| 2503 | AAAAAACUAGAUUGACUAU | 538 | 2503 | AAAAAACUAGAUUGACUAU | 538 | 2521 | AUAGUCAAUCUAGUUUUUU | 863 |
| 2521 | UUUAUACAAAUGGGGGCGG | 539 | 2521 | UUUAUACAAAUGGGGGCGG | 539 | 2539 | CCGCCCCCAUUUGUAUAAA | 864 |
| 2539 | GCUGGAAAGAGGAGAAGGA | 540 | 2539 | GCUGGAAAGAGGAGAAGGA | 540 | 2557 | UCCUUCUCCUCUUUCCAGC | 865 |
| 2557 | AGAGGGAGUACAAAGACAG | 541 | 2557 | AGAGGGAGUACAAAGACAG | 541 | 2575 | CUGUCUUUGUACUCCCUCU | 866 |
| 2575 | GGGAAUAGUGGGAUCAAAG | 542 | 2575 | GGGAAUAGUGGGAUCAAAG | 542 | 2593 | CUUUGAUCCCACUAUUCCC | 867 |
| 2593 | GCUAGGAAAGGCAGAAACA | 543 | 2593 | GCUAGGAAAGGCAGAAACA | 543 | 2611 | UGUUUCUGCCUUUCCUAGC | 868 |
| 2611 | ACAACCACUCACCAGUCCU | 544 | 2611 | ACAACCACUCACCAGUCCU | 544 | 2629 | AGGACUGGUGAGUGGUUGU | 869 |
| 2629 | UAGUUUUAGACCUCAUCUC | 545 | 2629 | UAGUUUUAGACCUCAUCUC | 545 | 2647 | GAGAUGAGGUCUAAAACUA | 870 |
| 2647 | CCAAGAUAGCAUCCCAUCU | 546 | 2647 | CCAAGAUAGCAUCCCAUCU | 546 | 2665 | AGAUGGGAUGCUAUCUUGG | 871 |
| 2665 | UCAGAAGAUGGGUGUUGUU | 547 | 2665 | UCAGAAGAUGGGUGUUGUU | 547 | 2683 | AACAACACCCAUCUUCUGA | 872 |
| 2683 | UUUCAAUGUUUUCUUUUCU | 548 | 2683 | UUUCAAUGUUUUCUUUUCU | 548 | 2701 | AGAAAAGAAAACAUUGAAA | 873 |
| 2701 | UGUGGUUGCAGCCUGACCA | 549 | 2701 | UGUGGUUGCAGCCUGACCA | 549 | 2719 | UGGUCAGGCUGCAACCACA | 874 |
| 2719 | AAAAGUGAGAUGGGAAGGG | 550 | 2719 | AAAAGUGAGAUGGGAAGGG | 550 | 2737 | CCCUUCCCAUCUCACUUUU | 875 |
| 2737 | GCUUAUCUAGCCAAAGAGC | 551 | 2737 | GCUUAUCUAGCCAAAGAGC | 551 | 2755 | GCUCUUUGGCUAGAUAAGC | 876 |
| 2755 | CUCUUUUUUAGCUCUCUUA | 552 | 2755 | CUCUUUUUUAGCUCUCUUA | 552 | 2773 | UAAGAGAGCUAAAAAAGAG | 877 |
| 2773 | AAAUGAAGUGCCCACUAAG | 553 | 2773 | AAAUGAAGUGCCCACUAAG | 553 | 2791 | CUUAGUGGGCACUUCAUUU | 878 |
| 2791 | GAAGUUCCACUUAACACAU | 554 | 2791 | GAAGUUCCACUUAACACAU | 554 | 2809 | AUGUGUUAAGUGGAACUUC | 879 |
| 2809 | UGAAUUUCUGCCAUAUUAA | 555 | 2809 | UGAAUUUCUGCCAUAUUAA | 555 | 2827 | UUAAUAUGGCAGAAAUUCA | 880 |
| 2827 | AUUUCAUUGUCUCUAUCUG | 556 | 2827 | AUUUCAUUGUCUCUAUCUG | 556 | 2845 | CAGAUAGAGACAAUGAAAU | 881 |
| 2845 | GAACCACCCUUUAUUCUAC | 557 | 2845 | GAACCACCCUUUAUUCUAC | 557 | 2863 | GUAGAAUAAAGGGUGGUUC | 882 |
| 2863 | CAUAUGAUAGGCAGCACUG | 558 | 2863 | CAUAUGAUAGGCAGCACUG | 558 | 2881 | CAGUGCUGCCUAUCAUAUG | 883 |
| 2881 | GAAAUAUCCUAACCCCCUA | 559 | 2881 | GAAAUAUCCUAACCCCCUA | 559 | 2899 | UAGGGGGUUAGGAUAUUUC | 884 |
| 2899 | AAGCUCCAGGUGCCCUGUG | 560 | 2899 | AAGCUCCAGGUGCCCUGUG | 560 | 2917 | CACAGGGCACCUGGAGCUU | 885 |
| 2917 | GGGAGAGCAACUGGACUAU | 561 | 2917 | GGGAGAGCAACUGGACUAU | 561 | 2935 | AUAGUCCAGUUGCUCUCCC | 886 |
| 2935 | UAGCAGGGCUGGGCUCUGU | 562 | 2935 | UAGCAGGGCUGGGCUCUGU | 562 | 2953 | ACAGAGCCCAGCCCUGCUA | 887 |
| 2953 | UCUUCCUGGUCAUAGGCUC | 563 | 2953 | UCUUCCUGGUCAUAGGCUC | 563 | 2971 | GAGCCUAUGACCAGGAAGA | 888 |
| 2971 | CACUCUUUCCCCCAAAUCU | 564 | 2971 | CACUCUUUCCCCCAAAUCU | 564 | 2989 | AGAUUUGGGGGAAAGAGUG | 889 |
| 2989 | UUCCUCUGGAGCUUUGCAG | 565 | 2989 | UUCCUCUGGAGCUUUGCAG | 565 | 3007 | CUGCAAAGCUCCAGAGGAA | 890 |
| 3007 | GCCAAGGUGCUAAAAGGAA | 566 | 3007 | GCCAAGGUGCUAAAAGGAA | 566 | 3025 | UUCCUUUUAGCACCUUGGC | 891 |
| 3025 | AUAGGUAGGAGACCUCUUC | 567 | 3025 | AUAGGUAGGAGACCUCUUC | 567 | 3043 | GAAGAGGUCUCCUACCUAU | 892 |
| 3043 | CUAUCUAAUCCUUAAAAGC | 568 | 3043 | CUAUCUAAUCCUUAAAAGC | 568 | 3061 | GCUUUUAAGGAUUAGAUAG | 893 |
| 3061 | CAUAAUGUUGAACAUUCAU | 569 | 3061 | CAUAAUGUUGAACAUUCAU | 569 | 3079 | AUGAAUGUUCAACAUUAUG | 894 |
| 3079 | UUCAACAGCUGAUGCCCUA | 570 | 3079 | UUCAACAGCUGAUGCCCUA | 570 | 3097 | UAGGGCAUCAGCUGUUGAA | 895 |
| 3097 | AUAACCCCUGCCUGGAUUU | 571 | 3097 | AUAACCCCUGCCUGGAUUU | 571 | 3115 | AAAUCCAGGCAGGGGUUAU | 896 |
| 3115 | UCUUCCUAUUAGGCUAUAA | 572 | 3115 | UCUUCCUAUUAGGCUAUAA | 572 | 3133 | UUAUAGCCUAAUAGGAAGA | 897 |
| 3133 | AGAAGUAGCAAGAUCUUUA | 573 | 3133 | AGAAGUAGCAAGAUCUUUA | 573 | 3151 | UAAAGAUCUUGCUACUUCU | 898 |
| 3151 | ACAUAAUUCAGAGUGGUUU | 574 | 3151 | ACAUAAUUCAGAGUGGUUU | 574 | 3169 | AAACCACUCUGAAUUAUGU | 899 |
| 3169 | UCAUUGCCUUCCUACCCUC | 575 | 3169 | UCAUUGCCUUCCUACCCUC | 575 | 3187 | GAGGGUAGGAAGGCAAUGA | 900 |
| 3187 | CUCUAAUGGCCCCUCCAUU | 576 | 3187 | CUCUAAUGGCCCCUCCAUU | 576 | 3205 | AAUGGAGGGGCCAUUAGAG | 901 |
| 3205 | UUAUUUGACUAAAGCAUCA | 577 | 3205 | UUAUUUGACUAAAGCAUCA | 577 | 3223 | UGAUGCUUUAGUCAAAUAA | 902 |
| 3223 | ACACAGUGGCACUAGCAUU | 578 | 3223 | ACACAGUGGCACUAGCAUU | 578 | 3241 | AAUGCUAGUGCCACUGUGU | 903 |
| 3241 | UAUACCAAGAGUAUGAGAA | 579 | 3241 | UAUACCAAGAGUAUGAGAA | 579 | 3259 | UUCUCAUACUCUUGGUAUA | 904 |
| 3259 | AAUACAGUGCUUUAUGGCU | 580 | 3259 | AAUACAGUGCUUUAUGGCU | 580 | 3277 | AGCCAUAAAGCACUGUAUU | 905 |
| 3277 | UCUAACAUUACUGCCUUCA | 581 | 3277 | UCUAACAUUACUGCCUUCA | 581 | 3295 | UGAAGGCAGUAAUGUUAGA | 906 |
| 3295 | AGUAUCAAGGCUGCCUGGA | 582 | 3295 | AGUAUCAAGGCUGCCUGGA | 582 | 3313 | UCCAGGCAGCCUUGAUACU | 907 |
| 3313 | AGAAAGGAUGGCAGCCUCA | 583 | 3313 | AGAAAGGAUGGCAGCCUCA | 583 | 3331 | UGAGGCUGCCAUCCUUUCU | 908 |
| 3331 | AGGGCUUCCUUAUGUCCUC | 584 | 3331 | AGGGCUUCCUUAUGUCCUC | 584 | 3349 | GAGGACAUAAGGAAGCCCU | 909 |
| 3349 | CCACCACAAGAGCUCCUUG | 585 | 3349 | CCACCACAAGAGCUCCUUG | 585 | 3367 | CAAGGAGCUCUUGUGGUGG | 910 |
| 3367 | GAUGAAGGUCAUCUUUUUC | 586 | 3367 | GAUGAAGGUCAUCUUUUUC | 586 | 3385 | GAAAAAGAUGACCUUCAUC | 911 |
| 3385 | CCCCUAUCCUGUUCUUCCC | 587 | 3385 | CCCCUAUCCUGUUCUUCCC | 587 | 3403 | GGGAAGAACAGGAUAGGGG | 912 |
| 3403 | CCUCCCCGCUCCUAAUGGU | 588 | 3403 | CCUCCCCGCUCCUAAUGGU | 588 | 3421 | ACCAUUAGGAGCGGGGAGG | 913 |
| 3421 | UACGUGGGUACCCAGGCUG | 589 | 3421 | UACGUGGGUACCCAGGCUG | 589 | 3439 | CAGCCUGGGUACCCACGUA | 914 |
| 3439 | GGUUCUUGGGCUAGGUAGU | 590 | 3439 | GGUUCUUGGGCUAGGUAGU | 590 | 3457 | ACUACCUAGCCCAAGAACC | 915 |
| 3457 | UGGGGACCAAGUUCAUUAC | 591 | 3457 | UGGGGACCAAGUUCAUUAC | 591 | 3475 | GUAAUGAACUUGGUCCCCA | 916 |
| 3475 | CCUCCCUAUCAGUUCUAGC | 592 | 3475 | CCUCCCUAUCAGUUCUAGC | 592 | 3493 | GCUAGAACUGAUAGGGAGG | 917 |
| 3493 | CAUAGUAAACUACGGUACC | 593 | 3493 | CAUAGUAAACUACGGUACC | 593 | 3511 | GGUACCGUAGUUUACUAUG | 918 |
| 3511 | CAGUGUUAGUGGGAAGAGC | 594 | 3511 | CAGUGUUAGUGGGAAGAGC | 594 | 3529 | GCUCUUCCCACUAACACUG | 919 |
| 3529 | CUGGGUUUUCCUAGUAUAC | 595 | 3529 | CUGGGUUUUCCUAGUAUAC | 595 | 3547 | GUAUACUAGGAAAACCCAG | 920 |
| 3547 | CCCACUGCAUCCUACUCCU | 596 | 3547 | CCCACUGCAUCCUACUCCU | 596 | 3565 | AGGAGUAGGAUGCAGUGGG | 921 |
| 3565 | UACCUGGUCAACCCGCUGC | 597 | 3565 | UACCUGGUCAACCCGCUGC | 597 | 3583 | GCAGCGGGUUGACCAGGUA | 922 |
| 3583 | CUUCCAGGUAUGGGACCUG | 598 | 3583 | CUUCCAGGUAUGGGACCUG | 598 | 3601 | CAGGUCCCAUACCUGGAAG | 923 |
| 3601 | GCUAAGUGUGGAAUUACCU | 599 | 3601 | GCUAAGUGUGGAAUUACCU | 599 | 3619 | AGGUAAUUCCACACUUAGC | 924 |
| 3619 | UGAUAAGGGAGAGGGAAAU | 600 | 3619 | UGAUAAGGGAGAGGGAAAU | 600 | 3637 | AUUUCCCUCUCCCUUAUCA | 925 |
| 3637 | UACAAGGAGGGCCUCUGGU | 601 | 3637 | UACAAGGAGGGCCUCUGGU | 601 | 3655 | ACCAGAGGCCCUCCUUGUA | 926 |
| 3655 | UGUUCCUGGCCUCAGCCAG | 602 | 3655 | UGUUCCUGGCCUCAGCCAG | 602 | 3673 | CUGGCUGAGGCCAGGAACA | 927 |
| 3673 | GCUGCCCACAAGCCAUAAA | 603 | 3673 | GCUGCCCACAAGCCAUAAA | 603 | 3691 | UUUAUGGCUUGUGGGCAGC | 928 |
| 3691 | ACCAAUAAAACAAGAAUAC | 604 | 3691 | ACCAAUAAAACAAGAAUAC | 604 | 3709 | GUAUUCUUGUUUUAUUGGU | 929 |
| 3709 | CUGAGUCAGUUUUUUAUCU | 605 | 3709 | CUGAGUCAGUUUUUUAUCU | 605 | 3727 | AGAUAAAAAACUGACUCAG | 930 |
| 3727 | UGGGUUCUCUUCAUUCCCA | 606 | 3727 | UGGGUUCUCUUCAUUCCCA | 606 | 3745 | UGGGAAUGAAGAGAACCCA | 931 |
| 3745 | ACUGCACUUGGUGCUGCUU | 607 | 3745 | ACUGCACUUGGUGCUGCUU | 607 | 3763 | AAGCAGCACCAAGUGCAGU | 932 |
| 3763 | UUGGCUGACUGGGAACACC | 608 | 3763 | UUGGCUGACUGGGAACACC | 608 | 3781 | GGUGUUCCCAGUCAGCCAA | 933 |
| 3781 | CCCAUAACUACAGAGUCUG | 609 | 3781 | CCCAUAACUACAGAGUCUG | 609 | 3799 | CAGACUCUGUAGUUAUGGG | 934 |
| 3799 | GACAGGAAGACUGGAGACU | 610 | 3799 | GACAGGAAGACUGGAGACU | 610 | 3817 | AGUCUCCAGUCUUCCUGUC | 935 |
| 3817 | UGUCCACUUCUAGCUCGGA | 611 | 3817 | UGUCCACUUCUAGCUCGGA | 611 | 3835 | UCCGAGCUAGAAGUGGACA | 936 |
| 3835 | AACUUACUGUGUAAAUAAA | 612 | 3835 | AACUUACUGUGUAAAUAAA | 612 | 3853 | UUUAUUUACACAGUAAGUU | 937 |
| 3853 | ACUUUCAGAACUGCUACCA | 613 | 3853 | ACUUUCAGAACUGCUACCA | 613 | 3871 | UGGUAGCAGUUCUGAAAGU | 938 |
| 3871 | AUGAAGUGAAAAUGCCACA | 614 | 3871 | AUGAAGUGAAAAUGCCACA | 614 | 3889 | UGUGGCAUUUUCACUUCAU | 939 |
| 3889 | AUUUUGCUUUAUAAUUUCU | 615 | 3889 | AUUUUGCUUUAUAAUUUCU | 615 | 3907 | AGAAAUUAUAAAGCAAAAU | 940 |
| 3907 | UACCCAUGUUGGGAAAAAC | 616 | 3907 | UACCCAUGUUGGGAAAAAC | 616 | 3925 | GUUUUUCCCAACAUGGGUA | 941 |
| 3925 | CUGGCUUUUUCCCAGCCCU | 617 | 3925 | CUGGCUUUUUCCCAGCCCU | 617 | 3943 | AGGGCUGGGAAAAAGCCAG | 942 |
| 3943 | UUUCCAGGGCAUAAAACUC | 618 | 3943 | UUUCCAGGGCAUAAAACUC | 618 | 3961 | GAGUUUUAUGCCCUGGAAA | 943 |
| 3961 | CAACCCCUUCGAUAGCAAG | 619 | 3961 | CAACCCCUUCGAUAGCAAG | 619 | 3979 | CUUGCUAUCGAAGGGGUUG | 944 |
| 3979 | GUCCCAUCAGCCUAUUAUU | 620 | 3979 | GUCCCAUCAGCCUAUUAUU | 620 | 3997 | AAUAAUAGGCUGAUGGGAC | 945 |
| 3997 | UUUUUUAAAGAAAACUUGC | 621 | 3997 | UUUUUUAAAGAAAACUUGC | 621 | 4015 | GCAAGUUUUCUUUAAAAAA | 946 |
| 4015 | CACUUGUUUUUCUUUUUAC | 622 | 4015 | CACUUGUUUUUCUUUUUAC | 622 | 4033 | GUAAAAAGAAAAACAAGUG | 947 |
| 4033 | CAGUUACUUCCUUCCUGCC | 623 | 4033 | CAGUUACUUCCUUCCUGCC | 623 | 4051 | GGCAGGAAGGAAGUAACUG | 948 |
| 4051 | CCCAAAAUUAUAAACUCUA | 624 | 4051 | CCCAAAAUUAUAAACUCUA | 624 | 4069 | UAGAGUUUAUAAUUUUGGG | 949 |
| 4069 | AAGUGUAAAAAAAAGUCUU | 625 | 4069 | AAGUGUAAAAAAAAGUCUU | 625 | 4087 | AAGACUUUUUUUUACACUU | 950 |
| 4087 | UAACAACAGCUUCUUGCUU | 626 | 4087 | UAACAACAGCUUCUUGCUU | 626 | 4105 | AAGCAAGAAGCUGUUGUUA | 951 |
| 4105 | UGUAAAAAUAUGUAUUAUA | 627 | 4105 | UGUAAAAAUAUGUAUUAUA | 627 | 4123 | UAUAAUACAUAUUUUUACA | 952 |
| 4123 | ACAUCUGUAUUUUUAAAUU | 628 | 4123 | ACAUCUGUAUUUUUAAAUU | 628 | 4141 | AAUUUAAAAAUACAGAUGU | 953 |
| 4141 | UCUGCUCCUGAAAAAUGAC | 629 | 4141 | UCUGCUCCUGAAAAAUGAC | 629 | 4159 | GUCAUUUUUCAGGAGCAGA | 954 |
| 4159 | CUGUCCCAUUCUCCACUCA | 630 | 4159 | CUGUCCCAUUCUCCACUCA | 630 | 4177 | UGAGUGGAGAAUGGGACAG | 955 |
| 4177 | ACUGCAUUUGGGGCCUUUC | 631 | 4177 | ACUGCAUUUGGGGCCUUUC | 631 | 4195 | GAAAGGCCCCAAAUGCAGU | 956 |
| 4195 | CCCAUUGGUCUGCAUGUCU | 632 | 4195 | CCCAUUGGUCUGCAUGUCU | 632 | 4213 | AGACAUGCAGACCAAUGGG | 957 |
| 4213 | UUUUAUCAUUGCAGGCCAG | 633 | 4213 | UUUUAUCAUUGCAGGCCAG | 633 | 4231 | CUGGCCUGCAAUGAUAAAA | 958 |
| 4231 | GUGGACAGAGGGAGAAGGG | 634 | 4231 | GUGGACAGAGGGAGAAGGG | 634 | 4249 | CCCUUCUCCCUCUGUCCAC | 959 |
| 4249 | GAGAACAGGGGUCGCCAAC | 635 | 4249 | GAGAACAGGGGUCGCCAAC | 635 | 4267 | GUUGGCGACCCCUGUUCUC | 960 |
| 4267 | CACUUGUGUUGCUUUCUGA | 636 | 4267 | CACUUGUGUUGCUUUCUGA | 636 | 4285 | UCAGAAAGCAACACAAGUG | 961 |
| 4285 | ACUGAUCCUGAACAAGAAA | 637 | 4285 | ACUGAUCCUGAACAAGAAA | 637 | 4303 | UUUCUUGUUCAGGAUCAGU | 962 |
| 4303 | AGAGUAACACUGAGGCGCU | 638 | 4303 | AGAGUAACACUGAGGCGCU | 638 | 4321 | AGCGCCUCAGUGUUACUCU | 963 |
| 4321 | UCGCUCCCAUGCACAACUC | 639 | 4321 | UCGCUCCCAUGCACAACUC | 639 | 4339 | GAGUUGUGCAUGGGAGCGA | 964 |
| 4339 | CUCCAAAACACUUAUCCUC | 640 | 4339 | CUCCAAAACACUUAUCCUC | 640 | 4357 | GAGGAUAAGUGUUUUGGAG | 965 |
| 4357 | CCUGCAAGAGUGGGCUUUC | 641 | 4357 | CCUGCAAGAGUGGGCUUUC | 641 | 4375 | GAAAGCCCACUCUUGCAGG | 966 |
| 4375 | CCAGGGUCUUUACUGGGAA | 642 | 4375 | CCAGGGUCUUUACUGGGAA | 642 | 4393 | UUCCCAGUAAAGACCCUGG | 967 |
| 4393 | AGCAGUUAAGCCCCCUCCU | 643 | 4393 | AGCAGUUAAGCCCCCUCCU | 643 | 4411 | AGGAGGGGGCUUAACUGCU | 968 |
| 4411 | UCACCCCUUCCUUUUUUCU | 644 | 4411 | UCACCCCUUCCUUUUUUCU | 644 | 4429 | AGAAAAAAGGAAGGGGUGA | 969 |
| 4429 | UUUCUUUACUCCUUUGGCU | 645 | 4429 | UUUCUUUACUCCUUUGGCU | 645 | 4447 | AGCCAAAGGAGUAAAGAAA | 970 |
| 4447 | UUCAAAGGAUUUUGGAAAA | 646 | 4447 | UUCAAAGGAUUUUGGAAAA | 646 | 4465 | UUUUCCAAAAUCCUUUGAA | 971 |
| 4465 | AGAAACAAUAUGCUUUACA | 647 | 4465 | AGAAACAAUAUGCUUUACA | 647 | 4483 | UGUAAAGCAUAUUGUUUCU | 972 |
| 4483 | ACUCAUUUUCAAUUUCUAA | 648 | 4483 | ACUCAUUUUCAAUUUCUAA | 648 | 4501 | UUAGAAAUUGAAAAUGAGU | 973 |
| 4501 | AAUUUGCAGGGGAUACUGA | 649 | 4501 | AAUUUGCAGGGGAUACUGA | 649 | 4519 | UCAGUAUCCCCUGCAAAUU | 974 |
| 4519 | AAAAAUACGGCAGGUGGCC | 650 | 4519 | AAAAAUACGGCAGGUGGCC | 650 | 4537 | GGCCACCUGCCGUAUUUUU | 975 |
| 4537 | CUAAGGCUGCUGUAAAGUU | 651 | 4537 | CUAAGGCUGCUGUAAAGUU | 651 | 4555 | AACUUUACAGCAGCCUUAG | 976 |
| 4555 | UGAGGGGAGAGGAAAUCUU | 652 | 4555 | UGAGGGGAGAGGAAAUCUU | 652 | 4573 | AAGAUUUCCUCUCCCCUCA | 977 |
| 4573 | UAAGAUUACAAGAUAAAAA | 653 | 4573 | UAAGAUUACAAGAUAAAAA | 653 | 4591 | UUUUUAUCUUGUAAUCUUA | 978 |
| 4591 | AACGAAUCCCCUAAACAAA | 654 | 4591 | AACGAAUCCCCUAAACAAA | 654 | 4609 | UUUGUUUAGGGGAUUCGUU | 979 |
| 4609 | AAAGAACAAUAGAACUGGU | 655 | 4609 | AAAGAACAAUAGAACUGGU | 655 | 4627 | ACCAGUUCUAUUGUUCUUU | 980 |
| 4627 | UCUUCCAUUUUGCCACCUU | 656 | 4627 | UCUUCCAUUUUGCCACCUU | 656 | 4645 | AAGGUGGCAAAAUGGAAGA | 981 |
| 4645 | UUCCUGUUCAUGACAGCUA | 657 | 4645 | UUCCUGUUCAUGACAGCUA | 657 | 4663 | UAGCUGUCAUGAACAGGAA | 982 |
| 4663 | ACUAACCUGGAGACAGUAA | 658 | 4663 | ACUAACCUGGAGACAGUAA | 658 | 4681 | UUACUGUCUCCAGGUUAGU | 983 |
| 4681 | ACAUUUCAUUAACCAAAGA | 659 | 4681 | ACAUUUCAUUAACCAAAGA | 659 | 4699 | UCUUUGGUUAAUGAAAUGU | 984 |
| 4699 | AAAGUGGGUCACCUGACCU | 660 | 4699 | AAAGUGGGUCACCUGACCU | 660 | 4717 | AGGUCAGGUGACCCACUUU | 985 |
| 4717 | UCUGAAGAGCUGAGUACUC | 661 | 4717 | UCUGAAGAGCUGAGUACUC | 661 | 4735 | GAGUACUCAGCUCUUCAGA | 986 |
| 4735 | CAGGCCACUCCAAUCACCC | 662 | 4735 | CAGGCCACUCCAAUCACCC | 662 | 4753 | GGGUGAUUGGAGUGGCCUG | 987 |
| 4753 | CUACAAGAUGCCAAGGAGG | 663 | 4753 | CUACAAGAUGCCAAGGAGG | 663 | 4771 | CCUCCUUGGCAUCUUGUAG | 988 |
| 4771 | GUCCCAGGAAGUCCAGCUC | 664 | 4771 | GUCCCAGGAAGUCCAGCUC | 664 | 4789 | GAGCUGGACUUCCUGGGAC | 989 |
| 4789 | CCUUAAACUGACGCUAGUC | 665 | 4789 | CCUUAAACUGACGCUAGUC | 665 | 4807 | GACUAGCGUCAGUUUAAGG | 990 |
| 4807 | CAAUAAACCUGGGCAAGUG | 666 | 4807 | CAAUAAACCUGGGCAAGUG | 666 | 4825 | CACUUGCCCAGGUUUAUUG | 991 |
| 4825 | GAGGCAAGAGAAAUGAGGA | 667 | 4825 | GAGGCAAGAGAAAUGAGGA | 667 | 4843 | UCCUCAUUUCUCUUGCCUC | 992 |
| 4843 | AAGAAUCCAUCUGUGAGGU | 668 | 4843 | AAGAAUCCAUCUGUGAGGU | 668 | 4861 | ACCUCACAGAUGGAUUCUU | 993 |
| 4861 | UGACAGGCAAGGAUGAAAG | 669 | 4861 | UGACAGGCAAGGAUGAAAG | 669 | 4879 | CUUUCAUCCUUGCCUGUCA | 994 |
| 4879 | GACAAAGAAGGAAAAGAGU | 670 | 4879 | GACAAAGAAGGAAAAGAGU | 670 | 4897 | ACUCUUUUCCUUCUUUGUC | 995 |
| 4897 | UAUCAAAGGCAGAAAGGAG | 671 | 4897 | UAUCAAAGGCAGAAAGGAG | 671 | 4915 | CUCCUUUCUGCCUUUGAUA | 996 |
| 4915 | GAUCAUUUAGUUGGGUCUG | 672 | 4915 | GAUCAUUUAGUUGGGUCUG | 672 | 4933 | CAGACCCAACUAAAUGAUC | 997 |
| 4933 | GAAAGGAAAAGUCUUUGCU | 673 | 4933 | GAAAGGAAAAGUCUUUGCU | 673 | 4951 | AGCAAAGACUUUUCCUUUC | 998 |
| 4951 | UAUCCGACAUGUACUGCUA | 674 | 4951 | UAUCCGACAUGUACUGCUA | 674 | 4969 | UAGCAGUACAUGUCGGAUA | 999 |
| 4969 | AGUACCUGUAAGCAUUUUA | 675 | 4969 | AGUACCUGUAAGCAUUUUA | 675 | 4987 | UAAAAUGCUUACAGGUACU | 1000 |
| 4987 | AGGUCCCAGAAUGGAAAAA | 676 | 4987 | AGGUCCCAGAAUGGAAAAA | 676 | 5005 | UUUUUCCAUUCUGGGACCU | 1001 |
| 5005 | AAAAAUCAGCUAUUGGUAA | 677 | 5005 | AAAAAUCAGCUAUUGGUAA | 677 | 5023 | UUACCAAUAGCUGAUUUUU | 1002 |
| 5023 | AUAUAAUAAUGUCCUUUCC | 678 | 5023 | AUAUAAUAAUGUCCUUUCC | 678 | 5041 | GGAAAGGACAUUAUUAUAU | 1003 |
| 5041 | CCUGGAGUCAGUUUUUUUA | 679 | 5041 | CCUGGAGUCAGUUUUUUUA | 679 | 5059 | UAAAAAAACUGACUCCAGG | 1004 |
| 5059 | AAAAAGUUAACUCUUAGUU | 680 | 5059 | AAAAAGUUAACUCUUAGUU | 680 | 5077 | AACUAAGAGUUAACUUUUU | 1005 |
| 5077 | UUUUACUUGUUUAAUUCUA | 681 | 5077 | UUUUACUUGUUUAAUUCUA | 681 | 5095 | UAGAAUUAAACAAGUAAAA | 1006 |
| 5095 | AAAAGAGAAGGGAGCUGAG | 682 | 5095 | AAAAGAGAAGGGAGCUGAG | 682 | 5113 | CUCAGCUCCCUUCUCUUUU | 1007 |
| 5113 | GGCCAUUCCCUGUAGGAGU | 683 | 5113 | GGCCAUUCCCUGUAGGAGU | 683 | 5131 | ACUCCUACAGGGAAUGGCC | 1008 |
| 5131 | UAAAGAUAAAAGGAUAGGA | 684 | 5131 | UAAAGAUAAAAGGAUAGGA | 684 | 5149 | UCCUAUCCUUUUAUCUUUA | 1009 |
| 5149 | AAAAGAUUCAAAGCUCUAA | 685 | 5149 | AAAAGAUUCAAAGCUCUAA | 685 | 5167 | UUAGAGCUUUGAAUCUUUU | 1010 |
| 5167 | AUAGAGUCACAGCUUUCCC | 686 | 5167 | AUAGAGUCACAGCUUUCCC | 686 | 5185 | GGGAAAGCUGUGACUCUAU | 1011 |
| 5185 | CAGGUAUAAAACCUAAAAU | 687 | 5185 | CAGGUAUAAAACCUAAAAU | 687 | 5203 | AUUUUAGGUUUUAUACCUG | 1012 |
| 5203 | UUAAGAAGUACAAUAAGCA | 688 | 5203 | UUAAGAAGUACAAUAAGCA | 688 | 5221 | UGCUUAUUGUACUUCUUAA | 1013 |
| 5221 | AGAGGUGGAAAAUGAUCUA | 689 | 5221 | AGAGGUGGAAAAUGAUCUA | 689 | 5239 | UAGAUCAUUUUCCACCUCU | 1014 |
| 5239 | AGUUCCUGAUAGCUACCCA | 690 | 5239 | AGUUCCUGAUAGCUACCCA | 690 | 5257 | UGGGUAGCUAUCAGGAACU | 1015 |
| 5257 | ACAGAGCAAGUGAUUUAUA | 691 | 5257 | ACAGAGCAAGUGAUUUAUA | 691 | 5275 | UAUAAAUCACUUGCUCUGU | 1016 |
| 5275 | AAAUUUGAAAUCCAAACUA | 692 | 5275 | AAAUUUGAAAUCCAAACUA | 692 | 5293 | UAGUUUGGAUUUCAAAUUU | 1017 |
| 5293 | ACUUUCUUAAUAUCACUUU | 693 | 5293 | ACUUUCUUAAUAUCACUUU | 693 | 5311 | AAAGUGAUAUUAAGAAAGU | 1018 |
| 5311 | UGGUCUCCAUUUUUCCCAG | 694 | 5311 | UGGUCUCCAUUUUUCCCAG | 694 | 5329 | CUGGGAAAAAUGGAGACCA | 1019 |
| 5329 | GGACAGGAAAUAUGUCCCC | 695 | 5329 | GGACAGGAAAUAUGUCCCC | 695 | 5347 | GGGGACAUAUUUCCUGUCC | 1020 |
| 5347 | CCCCUAACUUUCUUGCUUC | 696 | 5347 | CCCCUAACUUUCUUGCUUC | 696 | 5365 | GAAGCAAGAAAGUUAGGGG | 1021 |
| 5365 | CAAAAAUUAAAAUCCAGCA | 697 | 5365 | CAAAAAUUAAAAUCCAGCA | 697 | 5383 | UGCUGGAUUUUAAUUUUUG | 1022 |
| 5383 | AUCCCAAGAUCAUUCUACA | 698 | 5383 | AUCCCAAGAUCAUUCUACA | 698 | 5401 | UGUAGAAUGAUCUUGGGAU | 1023 |
| 5401 | AAGUAAUUUUGCACAGACA | 699 | 5401 | AAGUAAUUUUGCACAGACA | 699 | 5419 | UGUCUGUGCAAAAUUACUU | 1024 |
| 5419 | AUCUCCUCACCCCAGUGCC | 700 | 5419 | AUCUCCUCACCCCAGUGCC | 700 | 5437 | GGCACUGGGGUGAGGAGAU | 1025 |
| 5437 | CUGUCUGGAGCUCACCCAA | 701 | 5437 | CUGUCUGGAGCUCACCCAA | 701 | 5455 | UUGGGUGAGCUCCAGACAG | 1026 |
| 5455 | AGGUCACCAAACAACUUGG | 702 | 5455 | AGGUCACCAAACAACUUGG | 702 | 5473 | CCAAGUUGUUUGGUGACCU | 1027 |
| 5473 | GUUGUGAACCAACUGCCUU | 703 | 5473 | GUUGUGAACCAACUGCCUU | 703 | 5491 | AAGGCAGUUGGUUCACAAC | 1028 |
| 5491 | UAACCUUCUGGGGGAGGGG | 704 | 5491 | UAACCUUCUGGGGGAGGGG | 704 | 5509 | CCCCUCCCCCAGAAGGUUA | 1029 |
| 5509 | GGAUUAGCUAGACUAGGAG | 705 | 5509 | GGAUUAGCUAGACUAGGAG | 705 | 5527 | CUCCUAGUCUAGCUAAUCC | 1030 |
| 5527 | GACCAGAAGUGAAUGGGAA | 706 | 5527 | GACCAGAAGUGAAUGGGAA | 706 | 5545 | UUCCCAUUCACUUCUGGUC | 1031 |
| 5545 | AAGGGUGAGGACUUCACAA | 707 | 5545 | AAGGGUGAGGACUUCACAA | 707 | 5563 | UUGUGAAGUCCUCACCCUU | 1032 |
| 5563 | AUGUUGGCCUGUCAGAGCU | 708 | 5563 | AUGUUGGCCUGUCAGAGCU | 708 | 5581 | AGCUCUGACAGGCCAACAU | 1033 |
| 5581 | UUGAUUAGAAGCCAAGACA | 709 | 5581 | UUGAUUAGAAGCCAAGACA | 709 | 5599 | UGUCUUGGCUUCUAAUCAA | 1034 |
| 5599 | AGUGGCAGCAAAGGAAGAC | 710 | 5599 | AGUGGCAGCAAAGGAAGAC | 710 | 5617 | GUCUUCCUUUGCUGCCACU | 1035 |
| 5617 | CUUGGCCCAGGAAAAACCU | 711 | 5617 | CUUGGCCCAGGAAAAACCU | 711 | 5635 | AGGUUUUUCCUGGGCCAAG | 1036 |
| 5635 | UGUGGGUUGUGCUAAUUUC | 712 | 5635 | UGUGGGUUGUGCUAAUUUC | 712 | 5653 | GAAAUUAGCACAACCCACA | 1037 |
| 5653 | CUGUCCAGAAAAUAGGGUG | 713 | 5653 | CUGUCCAGAAAAUAGGGUG | 713 | 5671 | CACCCUAUUUUCUGGACAG | 1038 |
| 5671 | GGACAGAAGCUUGUGGGGU | 714 | 5671 | GGACAGAAGCUUGUGGGGU | 714 | 5689 | ACCCCACAAGCUUCUGUCC | 1039 |
| 5689 | UGCAUGGAGGAAUUGGGAC | 715 | 5689 | UGCAUGGAGGAAUUGGGAC | 715 | 5707 | GUCCCAAUUCCUCCAUGCA | 1040 |
| 5707 | CCUGGUUAUGUUGUUAUUC | 716 | 5707 | CCUGGUUAUGUUGUUAUUC | 716 | 5725 | GAAUAACAACAUAACCAGG | 1041 |
| 5725 | CUCGGACUGUGAAUUUUGG | 717 | 5725 | CUCGGACUGUGAAUUUUGG | 717 | 5743 | CCAAAAUUCACAGUCCGAG | 1042 |
| 5743 | GUGAUGUAAAACAGAAUAU | 718 | 5743 | GUGAUGUAAAACAGAAUAU | 718 | 5761 | AUAUUCUGUUUUACAUCAC | 1043 |
| 5761 | UUCUGUAAACCUAAUGUCU | 719 | 5761 | UUCUGUAAACCUAAUGUCU | 719 | 5779 | AGACAUUAGGUUUACAGAA | 1044 |
| 5779 | UGUAUAAAUAAUGAGCGUU | 720 | 5779 | UGUAUAAAUAAUGAGCGUU | 720 | 5797 | AACGCUCAUUAUUUAUACA | 1045 |
| 5797 | UAACACAGUAAAAUAUUCA | 721 | 5797 | UAACACAGUAAAAUAUUCA | 721 | 5815 | UGAAUAUUUUACUGUGUUA | 1046 |
| 5815 | AAUAAGAAGUCAAAAAAAA | 722 | 5815 | AAUAAGAAGUCAAAAAAAA | 722 | 5833 | UUUUUUUUGACUUCUUAUU | 1047 |
| 5821 | AAGUCAAAAAAAAAAAAAA | 723 | 5821 | AAGUCAAAAAAAAAAAAAA | 723 | 5839 | UUUUUUUUUUUUUUGACUU | 1048 |

PSEN1 NM_007319

| | | | | | | | | |
|---|---|---|---|---|---|---|---|---|
| 3 | GACAGAGUUACCUGCACCG | 1049 | 3 | GACAGAGUUACCUGCACCG | 1049 | 21 | CGGUGCAGGUAACUCUGUC | 1132 |
| 21 | GUUGUCCUACUUCCAGAAU | 1050 | 21 | GUUGUCCUACUUCCAGAAU | 1050 | 39 | AUUCUGGAAGUAGGACAAC | 1133 |
| 39 | UGCACAGAUGUCUGAGGAC | 1051 | 39 | UGCACAGAUGUCUGAGGAC | 1051 | 57 | GUCCUCAGACAUCUGUGCA | 1134 |
| 57 | CAACCACCUGAGCAAUACU | 1052 | 57 | CAACCACCUGAGCAAUACU | 1052 | 75 | AGUAUUGCUCAGGUGGUUG | 1135 |
| 75 | UAAUGACAAUAGAGAACGG | 1053 | 75 | UAAUGACAAUAGAGAACGG | 1053 | 93 | CCGUUCUCUAUUGUCAUUA | 1136 |
| 93 | GCAGGAGCACAACGACAGA | 1054 | 93 | GCAGGAGCACAACGACAGA | 1054 | 111 | UCUGUCGUUGUGCUCCUGC | 1137 |
| 111 | ACGGAGCCUUGGCCACCCU | 1055 | 111 | ACGGAGCCUUGGCCACCCU | 1055 | 129 | AGGGUGGCCAAGGCUCCGU | 1138 |
| 129 | UGAGCCAUUAUCUAAUGGA | 1056 | 129 | UGAGCCAUUAUCUAAUGGA | 1056 | 147 | UCCAUUAGAUAAUGGCUCA | 1139 |
| 147 | ACGACCCCAGGGUAACUCC | 1057 | 147 | ACGACCCCAGGGUAACUCC | 1057 | 165 | GGAGUUACCCUGGGGUCGU | 1140 |
| 165 | CCGGCAGGUGGUGGAGCAA | 1058 | 165 | CCGGCAGGUGGUGGAGCAA | 1058 | 183 | UUGCUCCACCACCUGCCGG | 1141 |
| 183 | AGAUGAGGAAGAAGAUGAG | 1059 | 183 | AGAUGAGGAAGAAGAUGAG | 1059 | 201 | CUCAUCUUCUUCCUCAUCU | 1142 |
| 201 | GGAGCUGACAUUGAAAUAU | 1060 | 201 | GGAGCUGACAUUGAAAUAU | 1060 | 219 | AUAUUUCAAUGUCAGCUCC | 1143 |
| 219 | UGGCGCCAAGCAUGUGAUC | 1061 | 219 | UGGCGCCAAGCAUGUGAUC | 1061 | 237 | GAUCACAUGCUUGGCGCCA | 1144 |
| 237 | CAUGCUCUUUGUCCCUGUG | 1062 | 237 | CAUGCUCUUUGUCCCUGUG | 1062 | 255 | CACAGGGACAAAGAGCAUG | 1145 |
| 255 | GACUCUCUGCAUGGUGGUG | 1063 | 255 | GACUCUCUGCAUGGUGGUG | 1063 | 273 | CACCACCAUGCAGAGAGUC | 1146 |
| 273 | GGUCGUGGCUACCAUUAAG | 1064 | 273 | GGUCGUGGCUACCAUUAAG | 1064 | 291 | CUUAAUGGUAGCCACGACC | 1147 |
| 291 | GUCAGUCAGCUUUUAUACC | 1065 | 291 | GUCAGUCAGCUUUUAUACC | 1065 | 309 | GGUAUAAAAGCUGACUGAC | 1148 |
| 309 | CCGGAAGGAUGGGCAGCUA | 1066 | 309 | CCGGAAGGAUGGGCAGCUA | 1066 | 327 | UAGCUGCCCAUCCUUCCGG | 1149 |
| 327 | AAUCUAUACCCCAUUCACA | 1067 | 327 | AAUCUAUACCCCAUUCACA | 1067 | 345 | UGUGAAUGGGGUAUAGAUU | 1150 |
| 345 | AGAAGAUACCGAGACUGUG | 1068 | 345 | AGAAGAUACCGAGACUGUG | 1068 | 363 | CACAGUCUCGGUAUCUUCU | 1151 |
| 363 | GGGCCAGAGAGCCCUGCAC | 1069 | 363 | GGGCCAGAGAGCCCUGCAC | 1069 | 381 | GUGCAGGGCUCUCUGGCCC | 1152 |
| 381 | CUCAAUUCUGAAUGCUGCC | 1070 | 381 | CUCAAUUCUGAAUGCUGCC | 1070 | 399 | GGCAGCAUUCAGAAUUGAG | 1153 |
| 399 | CAUCAUGAUCAGUGUCAUU | 1071 | 399 | CAUCAUGAUCAGUGUCAUU | 1071 | 417 | AAUGACACUGAUCAUGAUG | 1154 |
| 417 | UGUUGUCAUGACUAUCCUC | 1072 | 417 | UGUUGUCAUGACUAUCCUC | 1072 | 435 | GAGGAUAGUCAUGACAACA | 1155 |
| 435 | CCUGGUGGUUCUGUAUAAA | 1073 | 435 | CCUGGUGGUUCUGUAUAAA | 1073 | 453 | UUUAUACAGAACCACCAGG | 1156 |
| 453 | AUACAGGUGCUAUAAGGUC | 1074 | 453 | AUACAGGUGCUAUAAGGUC | 1074 | 471 | GACCUUAUAGCACCUGUAU | 1157 |
| 471 | CAUCCAUGCCUGGCUUAUU | 1075 | 471 | CAUCCAUGCCUGGCUUAUU | 1075 | 489 | AAUAAGCCAGGCAUGGAUG | 1158 |
| 489 | UAUAUCAUCUCUAUUGUUG | 1076 | 489 | UAUAUCAUCUCUAUUGUUG | 1076 | 507 | CAACAAUAGAGAUGAUAUA | 1159 |
| 507 | GCUGUUCUUUUUUUCAUUC | 1077 | 507 | GCUGUUCUUUUUUUCAUUC | 1077 | 525 | GAAUGAAAAAAAGAACAGC | 1160 |
| 525 | CAUUUACUUGGGGGAAGUG | 1078 | 525 | CAUUUACUUGGGGGAAGUG | 1078 | 543 | CACUUCCCCCAAGUAAAUG | 1161 |
| 543 | GUUUAAAACCUAUAACGUU | 1079 | 543 | GUUUAAAACCUAUAACGUU | 1079 | 561 | AACGUUAUAGGUUUUAAAC | 1162 |
| 561 | UGCUGUGGACUACAUUACU | 1080 | 561 | UGCUGUGGACUACAUUACU | 1080 | 579 | AGUAAUGUAGUCCACAGCA | 1163 |
| 579 | UGUUGCACUCCUGAUCUGG | 1081 | 579 | UGUUGCACUCCUGAUCUGG | 1081 | 597 | CCAGAUCAGGAGUGCAACA | 1164 |
| 597 | GAAUUUUGGUGUGGUGGGA | 1082 | 597 | GAAUUUUGGUGUGGUGGGA | 1082 | 615 | UCCCACCACACCAAAAUUC | 1165 |
| 615 | AAUGAUUUCCAUUCACUGG | 1083 | 615 | AAUGAUUUCCAUUCACUGG | 1083 | 633 | CCAGUGAAUGGAAAUCAUU | 1166 |
| 633 | GAAAGGUCCACUUCGACUC | 1084 | 633 | GAAAGGUCCACUUCGACUC | 1084 | 651 | GAGUCGAAGUGGACCUUUC | 1167 |
| 651 | CCAGCAGGCAUAUCUCAUU | 1085 | 651 | CCAGCAGGCAUAUCUCAUU | 1085 | 669 | AAUGAGAUAUGCCUGCUGG | 1168 |
| 669 | UAUGAUUAGUGCCCUCAUG | 1086 | 669 | UAUGAUUAGUGCCCUCAUG | 1086 | 687 | CAUGAGGGCACUAAUCAUA | 1169 |
| 687 | GGCCCUGGUGUUUAUCAAG | 1087 | 687 | GGCCCUGGUGUUUAUCAAG | 1087 | 705 | CUUGAUAAACACCAGGGCC | 1170 |
| 705 | GUACCUCCCUGAAUGGACU | 1088 | 705 | GUACCUCCCUGAAUGGACU | 1088 | 723 | AGUCCAUUCAGGGAGGUAC | 1171 |
| 723 | UGCGUGGCUCAUCUUGGCU | 1089 | 723 | UGCGUGGCUCAUCUUGGCU | 1089 | 741 | AGCCAAGAUGAGCCACGCA | 1172 |
| 741 | UGUGAUUUCGGUAUAUGAU | 1090 | 741 | UGUGAUUUCGGUAUAUGAU | 1090 | 759 | AUCAUAUACCGAAAUCACA | 1173 |
| 759 | UUUAGUGGCUGUUUUGUGU | 1091 | 759 | UUUAGUGGCUGUUUUGUGU | 1091 | 777 | ACACAAAACAGCCACUAAA | 1174 |
| 777 | UCCGAAAGGUCCACUUCGU | 1092 | 777 | UCCGAAAGGUCCACUUCGU | 1092 | 795 | ACGAAGUGGACCUUUCGGA | 1175 |
| 795 | UAUGCUGGUUGAAACAGCU | 1093 | 795 | UAUGCUGGUUGAAACAGCU | 1093 | 813 | AGCUGUUUCAACCAGCAUA | 1176 |
| 813 | UCAGGAGAGAAAUGAAACG | 1094 | 813 | UCAGGAGAGAAAUGAAACG | 1094 | 831 | CGUUUCAUUUCUCUCCUGA | 1177 |
| 831 | GCUUUUUCCAGCUCUCAUU | 1095 | 831 | GCUUUUUCCAGCUCUCAUU | 1095 | 849 | AAUGAGAGCUGGAAAAAGC | 1178 |
| 849 | UUACUCCUCAACAAUGGUG | 1096 | 849 | UUACUCCUCAACAAUGGUG | 1096 | 867 | CACCAUUGUUGAGGAGUAA | 1179 |
| 867 | GUGGUUGGUGAAUAUGGCA | 1097 | 867 | GUGGUUGGUGAAUAUGGCA | 1097 | 885 | UGCCAUAUUCACCAACCAC | 1180 |
| 885 | AGAAGGAGACCCGGAAGCU | 1098 | 885 | AGAAGGAGACCCGGAAGCU | 1098 | 903 | AGCUUCCGGGUCUCCUUCU | 1181 |
| 903 | UCAAAGGAGAGUAUCCAAA | 1099 | 903 | UCAAAGGAGAGUAUCCAAA | 1099 | 921 | UUUGGAUACUCUCCUUUGA | 1182 |
| 921 | AAAUUCCAAGUAUAAUGCA | 1100 | 921 | AAAUUCCAAGUAUAAUGCA | 1100 | 939 | UGCAUUAUACUUGGAAUUU | 1183 |
| 939 | AGAAAGAGCCUGUCUGCCU | 1101 | 939 | AGAAAGAGCCUGUCUGCCU | 1101 | 957 | AGGCAGACAGGCUCUUUCU | 1184 |
| 957 | UCCUGCUGCCAUCAACCUG | 1102 | 957 | UCCUGCUGCCAUCAACCUG | 1102 | 975 | CAGGUUGAUGGCAGCAGGA | 1185 |
| 975 | GCUGUCUAUAGCUCCCAUG | 1103 | 975 | GCUGUCUAUAGCUCCCAUG | 1103 | 993 | CAUGGGAGCUAUAGACAGC | 1186 |
| 993 | GGCACCCAGGCUGUUCAUG | 1104 | 993 | GGCACCCAGGCUGUUCAUG | 1104 | 1011 | CAUGAACAGCCUGGGUGCC | 1187 |
| 1011 | GCCAAAGGGUGCCUGCAGG | 1105 | 1011 | GCCAAAGGGUGCCUGCAGG | 1105 | 1029 | CCUGCAGGCACCCUUUGGC | 1188 |
| 1029 | GCCCACGGCACAGAAAGGG | 1106 | 1029 | GCCCACGGCACAGAAAGGG | 1106 | 1047 | CCCUUUCUGUGCCGUGGGC | 1189 |
| 1047 | GAGUCACAAGACACUGUUG | 1107 | 1047 | GAGUCACAAGACACUGUUG | 1107 | 1065 | CAACAGUGUCUUGUGACUC | 1190 |
| 1065 | GCAGAGAAUGAUGAUGGCG | 1108 | 1065 | GCAGAGAAUGAUGAUGGCG | 1108 | 1083 | CGCCAUCAUCAUUCUCUGC | 1191 |
| 1083 | GGGUUCAGUGAGGAAUGGG | 1109 | 1083 | GGGUUCAGUGAGGAAUGGG | 1109 | 1101 | CCCAUUCCUCACUGAACCC | 1192 |
| 1101 | GAAGCCCAGAGGGACAGUC | 1110 | 1101 | GAAGCCCAGAGGGACAGUC | 1110 | 1119 | GACUGUCCCUCUGGGCUUC | 1193 |
| 1119 | CAUCUAGGGCCUCAUCGCU | 1111 | 1119 | CAUCUAGGGCCUCAUCGCU | 1111 | 1137 | AGCGAUGAGGCCCUAGAUG | 1194 |
| 1137 | UCUACACCUGAGUCACGAG | 1112 | 1137 | UCUACACCUGAGUCACGAG | 1112 | 1155 | CUCGUGACUCAGGUGUAGA | 1195 |
| 1155 | GCUGCUGUCCAGGAACUUU | 1113 | 1155 | GCUGCUGUCCAGGAACUUU | 1113 | 1173 | AAAGUUCCUGGACAGCAGC | 1196 |
| 1173 | UCCAGCAGUAUCCUCGCUG | 1114 | 1173 | UCCAGCAGUAUCCUCGCUG | 1114 | 1191 | CAGCGAGGAUACUGCUGGA | 1197 |
| 1191 | GGUGAAGACCCAGAGGAAA | 1115 | 1191 | GGUGAAGACCCAGAGGAAA | 1115 | 1209 | UUUCCUCUGGGUCUUCACC | 1198 |
| 1209 | AGGGGAGUAAAACUUGGAU | 1116 | 1209 | AGGGGAGUAAAACUUGGAU | 1116 | 1227 | AUCCAAGUUUUACUCCCCU | 1199 |
| 1227 | UUGGGAGAUUUCAUUUUCU | 1117 | 1227 | UUGGGAGAUUUCAUUUUCU | 1117 | 1245 | AGAAAAUGAAAUCUCCCAA | 1200 |
| 1245 | UACAGUGUUCUGGUUGGUA | 1118 | 1245 | UACAGUGUUCUGGUUGGUA | 1118 | 1263 | UACCAACCAGAACACUGUA | 1201 |
| 1263 | AAAGCCUCAGCAACAGCCA | 1119 | 1263 | AAAGCCUCAGCAACAGCCA | 1119 | 1281 | UGGCUGUUGCUGAGGCUUU | 1202 |
| 1281 | AGUGGAGACUGGAACACAA | 1120 | 1281 | AGUGGAGACUGGAACACAA | 1120 | 1299 | UUGUGUUCCAGUCUCCACU | 1203 |
| 1299 | ACCAUAGCCUGUUUCGUAG | 1121 | 1299 | ACCAUAGCCUGUUUCGUAG | 1121 | 1317 | CUACGAAACAGGCUAUGGU | 1204 |
| 1317 | GCCAUAUUAAUUGGUUUGU | 1122 | 1317 | GCCAUAUUAAUUGGUUUGU | 1122 | 1335 | ACAAACCAAUUAAUAUGGC | 1205 |
| 1335 | UGCCUUACAUUAUUACUCC | 1123 | 1335 | UGCCUUACAUUAUUACUCC | 1123 | 1353 | GGAGUAAUAAUGUAAGGCA | 1206 |
| 1353 | CUUGCCAUUUUCAAGAAAG | 1124 | 1353 | CUUGCCAUUUUCAAGAAAG | 1124 | 1371 | CUUUCUUGAAAAUGGCAAG | 1207 |
| 1371 | GCAUUGCCAGCUCUUCCAA | 1125 | 1371 | GCAUUGCCAGCUCUUCCAA | 1125 | 1389 | UUGGAAGAGCUGGCAAUGC | 1208 |
| 1389 | AUCUCCAUCACCUUUGGGC | 1126 | 1389 | AUCUCCAUCACCUUUGGGC | 1126 | 1407 | GCCCAAAGGUGAUGGAGAU | 1209 |
| 1407 | CUUGUUUUCUACUUUGCCA | 1127 | 1407 | CUUGUUUUCUACUUUGCCA | 1127 | 1425 | UGGCAAAGUAGAAAACAAG | 1210 |
| 1425 | ACAGAUUAUCUUGUACAGC | 1128 | 1425 | ACAGAUUAUCUUGUACAGC | 1128 | 1443 | GCUGUACAAGAUAAUCUGU | 1211 |
| 1443 | CCUUUUAUGGACCAAUUAG | 1129 | 1443 | CCUUUUAUGGACCAAUUAG | 1129 | 1461 | CUAAUUGGUCCAUAAAAGG | 1212 |
| 1461 | GCAUUCCAUCAAUUUUAUA | 1130 | 1461 | GCAUUCCAUCAAUUUUAUA | 1130 | 1479 | UAUAAAAUUGAUGGAAUGC | 1213 |
| 1464 | UUCCAUCAAUUUUAUAUCU | 1131 | 1464 | UUCCAUCAAUUUUAUAUCU | 1131 | 1482 | AGAUAUAAAAUUGAUGGAA | 1214 |

PSEN2 NM_000447

| | | | | | | | | |
|---|---|---|---|---|---|---|---|---|
| 3 | AGCGGCGGCGGAGCAGGCA | 1215 | 3 | AGCGGCGGCGGAGCAGGCA | 1215 | 21 | UGCCUGCUCCGCCGCCGCU | 1339 |
| 21 | AUUUCCAGCAGUGAGGAGA | 1216 | 21 | AUUUCCAGCAGUGAGGAGA | 1216 | 39 | UCUCCUCACUGCUGGAAAU | 1340 |
| 39 | ACAGCCAGAAGCAAGCUAU | 1217 | 39 | ACAGCCAGAAGCAAGCUAU | 1217 | 57 | AUAGCUUGCUUCUGGCUGU | 1341 |
| 57 | UUGGAGCUGAAGGAACCUG | 1218 | 57 | UUGGAGCUGAAGGAACCUG | 1218 | 75 | CAGGUUCCUUCAGCUCCAA | 1342 |
| 75 | GAGACAGAAGCUAGUCCCC | 1219 | 75 | GAGACAGAAGCUAGUCCCC | 1219 | 93 | GGGGACUAGCUUCUGUCUC | 1343 |
| 93 | CCCUCUGAAUUUUACUGAU | 1220 | 93 | CCCUCUGAAUUUUACUGAU | 1220 | 111 | AUCAGUAAAAUUCAGAGGG | 1344 |
| 111 | UGAAGAAACUGAGGCCACA | 1221 | 111 | UGAAGAAACUGAGGCCACA | 1221 | 129 | UGUGGCCUCAGUUUCUUCA | 1345 |
| 129 | AGAGCUAAAGUGACUUUUC | 1222 | 129 | AGAGCUAAAGUGACUUUUC | 1222 | 147 | GAAAAGUCACUUUAGCUCU | 1346 |
| 147 | CCCAAGGUCGCCCAGCGAG | 1223 | 147 | CCCAAGGUCGCCCAGCGAG | 1223 | 165 | CUCGCUGGGCGACCUUGGG | 1347 |
| 165 | GGACGUGGGACUUCUCAGA | 1224 | 165 | GGACGUGGGACUUCUCAGA | 1224 | 183 | UCUGAGAAGUCCCACGUCC | 1348 |
| 183 | ACGUCAGGAGAGUGAUGUG | 1225 | 183 | ACGUCAGGAGAGUGAUGUG | 1225 | 201 | CACAUCACUCUCCUGACGU | 1349 |
| 201 | GAGGGAGCUGUGUGACCAU | 1226 | 201 | GAGGGAGCUGUGUGACCAU | 1226 | 219 | AUGGUCACACAGCUCCCUC | 1350 |
| 219 | UAGAAAGUGACGUGUUAAA | 1227 | 219 | UAGAAAGUGACGUGUUAAA | 1227 | 237 | UUUAACACGUCACUUUCUA | 1351 |
| 237 | AAACCAGCGCUGCCCUCUU | 1228 | 237 | AAACCAGCGCUGCCCUCUU | 1228 | 255 | AAGAGGGCAGCGCUGGUUU | 1352 |
| 255 | UUGAAAGCCAGGGAGCAUC | 1229 | 255 | UUGAAAGCCAGGGAGCAUC | 1229 | 273 | GAUGCUCCCUGGCUUUCAA | 1353 |
| 273 | CAUUCAUUUAGCCUGCUGA | 1230 | 273 | CAUUCAUUUAGCCUGCUGA | 1230 | 291 | UCAGCAGGCUAAAUGAAUG | 1354 |
| 291 | AGAAGAAGAAACCAAGUGU | 1231 | 291 | AGAAGAAGAAACCAAGUGU | 1231 | 309 | ACACUUGGUUUCUUCUUCU | 1355 |
| 309 | UCCGGGAUUCAGACCUCUC | 1232 | 309 | UCCGGGAUUCAGACCUCUC | 1232 | 327 | GAGAGGUCUGAAUCCCGGA | 1356 |
| 327 | CUGCGGCCCCAAGUGUUCG | 1233 | 327 | CUGCGGCCCCAAGUGUUCG | 1233 | 345 | CGAACACUUGGGGCCGCAG | 1357 |
| 345 | GUGGUGCUUCCAGAGGCAG | 1234 | 345 | GUGGUGCUUCCAGAGGCAG | 1234 | 363 | CUGCCUCUGGAAGCACCAC | 1358 |
| 363 | GGGCUAUGCUCACAUUCAU | 1235 | 363 | GGGCUAUGCUCACAUUCAU | 1235 | 381 | AUGAAUGUGAGCAUAGCCC | 1359 |
| 381 | UGGCCUCUGACAGCGAGGA | 1236 | 381 | UGGCCUCUGACAGCGAGGA | 1236 | 399 | UCCUCGCUGUCAGAGGCCA | 1360 |
| 399 | AAGAAGUGUGUGAUGAGCG | 1237 | 399 | AAGAAGUGUGUGAUGAGCG | 1237 | 417 | CGCUCAUCACACACUUCUU | 1361 |
| 417 | GGACGUCCCUAAUGUCGGC | 1238 | 417 | GGACGUCCCUAAUGUCGGC | 1238 | 435 | GCCGACAUUAGGGACGUCC | 1362 |
| 435 | CCGAGAGCCCCACGCCGCG | 1239 | 435 | CCGAGAGCCCCACGCCGCG | 1239 | 453 | CGCGGCGUGGGGCUCUCGG | 1363 |
| 453 | GCUCCUGCCAGGAGGGCAG | 1240 | 453 | GCUCCUGCCAGGAGGGCAG | 1240 | 471 | CUGCCCUCCUGGCAGGAGC | 1364 |
| 471 | GGCAGGGCCCAGAGGAUGG | 1241 | 471 | GGCAGGGCCCAGAGGAUGG | 1241 | 489 | CCAUCCUCUGGGCCCUGCC | 1365 |
| 489 | GAGAGAACACUGCCCAGUG | 1242 | 489 | GAGAGAACACUGCCCAGUG | 1242 | 507 | CACUGGGCAGUGUUCUCUC | 1366 |
| 507 | GGAGAAGCCAGGAGAACGA | 1243 | 507 | GGAGAAGCCAGGAGAACGA | 1243 | 525 | UCGUUCUCCUGGCUUCUCC | 1367 |
| 525 | AGGAGGACGGUGAGGAGGA | 1244 | 525 | AGGAGGACGGUGAGGAGGA | 1244 | 543 | UCCUCCUCACCGUCCUCCU | 1368 |
| 543 | ACCCUGACCGCUAUGUCUG | 1245 | 543 | ACCCUGACCGCUAUGUCUG | 1245 | 561 | CAGACAUAGCGGUCAGGGU | 1369 |
| 561 | GUAGUGGGGUUCCCGGGCG | 1246 | 561 | GUAGUGGGGUUCCCGGGCG | 1246 | 579 | CGCCCGGGAACCCCACUAC | 1370 |
| 579 | GGCCGCCAGGCCUGGAGGA | 1247 | 579 | GGCCGCCAGGCCUGGAGGA | 1247 | 597 | UCCUCCAGGCCUGGCGGCC | 1371 |
| 597 | AAGAGCUGACCCUCAAAUA | 1248 | 597 | AAGAGCUGACCCUCAAAUA | 1248 | 615 | UAUUUGAGGGUCAGCUCUU | 1372 |
| 615 | ACGGAGCGAAGCACGUGAU | 1249 | 615 | ACGGAGCGAAGCACGUGAU | 1249 | 633 | AUCACGUGCUUCGCUCCGU | 1373 |
| 633 | UCAUGCUGUUUGUGCCUGU | 1250 | 633 | UCAUGCUGUUUGUGCCUGU | 1250 | 651 | ACAGGCACAAACAGCAUGA | 1374 |
| 651 | UCACUCUGUGCAUGAUCGU | 1251 | 651 | UCACUCUGUGCAUGAUCGU | 1251 | 669 | ACGAUCAUGCACAGAGUGA | 1375 |
| 669 | UGGUGGUAGCCACCAUCAA | 1252 | 669 | UGGUGGUAGCCACCAUCAA | 1252 | 687 | UUGAUGGUGGCUACCACCA | 1376 |
| 687 | AGUCUGUGCGCUUCUACAC | 1253 | 687 | AGUCUGUGCGCUUCUACAC | 1253 | 705 | GUGUAGAAGCGCACAGACU | 1377 |
| 705 | CAGAGAAGAAUGGACAGCU | 1254 | 705 | CAGAGAAGAAUGGACAGCU | 1254 | 723 | AGCUGUCCAUUCUUCUCUG | 1378 |
| 723 | UCAUCUACACGACAUUCAC | 1255 | 723 | UCAUCUACACGACAUUCAC | 1255 | 741 | GUGAAUGUCGUGUAGAUGA | 1379 |
| 741 | CUGAGGACACACCCUCGGU | 1256 | 741 | CUGAGGACACACCCUCGGU | 1256 | 759 | ACCGAGGGUGUGUCCUCAG | 1380 |
| 759 | UGGGCCAGCGCCUCCUCAA | 1257 | 759 | UGGGCCAGCGCCUCCUCAA | 1257 | 777 | UUGAGGAGGCGCUGGCCCA | 1381 |
| 777 | ACUCCGUGCUGAACACCCU | 1258 | 777 | ACUCCGUGCUGAACACCCU | 1258 | 795 | AGGGUGUUCAGCACGGAGU | 1382 |
| 795 | UCAUCAUGAUCAGCGUCAU | 1259 | 795 | UCAUCAUGAUCAGCGUCAU | 1259 | 813 | AUGACGCUGAUCAUGAUGA | 1383 |
| 813 | UCGUGGUUAUGACCAUCUU | 1260 | 813 | UCGUGGUUAUGACCAUCUU | 1260 | 831 | AAGAUGGUCAUAACCACGA | 1384 |
| 831 | UCUUGGUGGUGCUCUACAA | 1261 | 831 | UCUUGGUGGUGCUCUACAA | 1261 | 849 | UUGUAGAGCACCACCAAGA | 1385 |
| 849 | AGUACCGCUGCUACAAGUU | 1262 | 849 | AGUACCGCUGCUACAAGUU | 1262 | 867 | AACUUGUAGCAGCGGUACU | 1386 |
| 867 | UCAUCCAUGGCUGGUUGAU | 1263 | 867 | UCAUCCAUGGCUGGUUGAU | 1263 | 885 | AUCAACCAGCCAUGGAUGA | 1387 |
| 885 | UCAUGUCUUCACUGAUGCU | 1264 | 885 | UCAUGUCUUCACUGAUGCU | 1264 | 903 | AGCAUCAGUGAAGACAUGA | 1388 |
| 903 | UGCUGUUCCUCUUCACCUA | 1265 | 903 | UGCUGUUCCUCUUCACCUA | 1265 | 921 | UAGGUGAAGAGGAACAGCA | 1389 |
| 921 | AUAUCUACCUUGGGGAAGU | 1266 | 921 | AUAUCUACCUUGGGGAAGU | 1266 | 939 | ACUUCCCCAAGGUAGAUAU | 1390 |
| 939 | UGCUCAAGACCUACAAUGU | 1267 | 939 | UGCUCAAGACCUACAAUGU | 1267 | 957 | ACAUUGUAGGUCUUGAGCA | 1391 |
| 957 | UGGCCAUGGACUACCCCAC | 1268 | 957 | UGGCCAUGGACUACCCCAC | 1268 | 975 | GUGGGGUAGUCCAUGGCCA | 1392 |
| 975 | CCCUCUUGCUGACUGUCUG | 1269 | 975 | CCCUCUUGCUGACUGUCUG | 1269 | 993 | CAGACAGUCAGCAAGAGGG | 1393 |
| 993 | GGAACUUCGGGGCAGUGGG | 1270 | 993 | GGAACUUCGGGGCAGUGGG | 1270 | 1011 | CCCACUGCCCCGAAGUUCC | 1394 |
| 1011 | GCAUGGUGUGCAUCCACUG | 1271 | 1011 | GCAUGGUGUGCAUCCACUG | 1271 | 1029 | CAGUGGAUGCACACCAUGC | 1395 |
| 1029 | GGAAGGGCCCUCUGGUGCU | 1272 | 1029 | GGAAGGGCCCUCUGGUGCU | 1272 | 1047 | AGCACCAGAGGGCCCUUCC | 1396 |
| 1047 | UGCAGCAGGCCUACCUCAU | 1273 | 1047 | UGCAGCAGGCCUACCUCAU | 1273 | 1065 | AUGAGGUAGGCCUGCUGCA | 1397 |
| 1065 | UCAUGAUCAGUGCGCUCAU | 1274 | 1065 | UCAUGAUCAGUGCGCUCAU | 1274 | 1083 | AUGAGCGCACUGAUCAUGA | 1398 |
| 1083 | UGGCCCUAGUGUUCAUCAA | 1275 | 1083 | UGGCCCUAGUGUUCAUCAA | 1275 | 1101 | UUGAUGAACACUAGGGCCA | 1399 |
| 1101 | AGUACCUCCCAGAGUGGUC | 1276 | 1101 | AGUACCUCCCAGAGUGGUC | 1276 | 1119 | GACCACUCUGGGAGGUACU | 1400 |
| 1119 | CCGCGUGGGUCAUCCUGGG | 1277 | 1119 | CCGCGUGGGUCAUCCUGGG | 1277 | 1137 | CCCAGGAUGACCCACGCGG | 1401 |
| 1137 | GCGCCAUCUCUGUGUAUGA | 1278 | 1137 | GCGCCAUCUCUGUGUAUGA | 1278 | 1155 | UCAUACACAGAGAUGGCGC | 1402 |
| 1155 | AUCUCGUGGCUGUGCUGUG | 1279 | 1155 | AUCUCGUGGCUGUGCUGUG | 1279 | 1173 | CACAGCACAGCCACGAGAU | 1403 |
| 1173 | GUCCCAAAGGGCCUCUGAG | 1280 | 1173 | GUCCCAAAGGGCCUCUGAG | 1280 | 1191 | CUCAGAGGCCCUUUGGGAC | 1404 |
| 1191 | GAAUGCUGGUAGAAACUGC | 1281 | 1191 | GAAUGCUGGUAGAAACUGC | 1281 | 1209 | GCAGUUUCUACCAGCAUUC | 1405 |
| 1209 | CCCAGGAGAGAAAUGAGCC | 1282 | 1209 | CCCAGGAGAGAAAUGAGCC | 1282 | 1227 | GGCUCAUUUCUCUCCUGGG | 1406 |
| 1227 | CCAUAUUCCCUGCCCUGAU | 1283 | 1227 | CCAUAUUCCCUGCCCUGAU | 1283 | 1245 | AUCAGGGCAGGGAAUAUGG | 1407 |
| 1245 | UAUACUCAUCUGCCAUGGU | 1284 | 1245 | UAUACUCAUCUGCCAUGGU | 1284 | 1263 | ACCAUGGCAGAUGAGUAUA | 1408 |
| 1263 | UGUGGACGGUUGGCAUGGC | 1285 | 1263 | UGUGGACGGUUGGCAUGGC | 1285 | 1281 | GCCAUGCCAACCGUCCACA | 1409 |
| 1281 | CGAAGCUGGACCCCUCCUC | 1286 | 1281 | CGAAGCUGGACCCCUCCUC | 1286 | 1299 | GAGGAGGGGUCCAGCUUCG | 1410 |
| 1299 | CUCAGGGUGCCCUCCAGCU | 1287 | 1299 | CUCAGGGUGCCCUCCAGCU | 1287 | 1317 | AGCUGGAGGGCACCCUGAG | 1411 |
| 1317 | UCCCCUACGACCCGGAGAU | 1288 | 1317 | UCCCCUACGACCCGGAGAU | 1288 | 1335 | AUCUCCGGGUCGUAGGGGA | 1412 |
| 1335 | UGGAAGAAGACUCCUAUGA | 1289 | 1335 | UGGAAGAAGACUCCUAUGA | 1289 | 1353 | UCAUAGGAGUCUUCUUCCA | 1413 |
| 1353 | ACAGUUUUGGGGAGCCUUC | 1290 | 1353 | ACAGUUUUGGGGAGCCUUC | 1290 | 1371 | GAAGGCUCCCCAAAACUGU | 1414 |
| 1371 | CAUACCCCGAAGUCUUUGA | 1291 | 1371 | CAUACCCCGAAGUCUUUGA | 1291 | 1389 | UCAAAGACUUCGGGGUAUG | 1415 |
| 1389 | AGCCUCCCUUGACUGGCUA | 1292 | 1389 | AGCCUCCCUUGACUGGCUA | 1292 | 1407 | UAGCCAGUCAAGGGAGGCU | 1416 |
| 1407 | ACCCAGGGGAGGAGCUGGA | 1293 | 1407 | ACCCAGGGGAGGAGCUGGA | 1293 | 1425 | UCCAGCUCCUCCCCUGGGU | 1417 |
| 1425 | AGGAAGAGGAGGAAAGGGG | 1294 | 1425 | AGGAAGAGGAGGAAAGGGG | 1294 | 1443 | CCCCUUUCCUCCUCUUCCU | 1418 |
| 1443 | GCGUGAAGCUUGGCCUCGG | 1295 | 1443 | GCGUGAAGCUUGGCCUCGG | 1295 | 1461 | CCGAGGCCAAGCUUCACGC | 1419 |
| 1461 | GGGACUUCAUCUUCUACAG | 1296 | 1461 | GGGACUUCAUCUUCUACAG | 1296 | 1479 | CUGUAGAAGAUGAAGUCCC | 1420 |
| 1479 | GUGUGCUGGUGGGCAAGGC | 1297 | 1479 | GUGUGCUGGUGGGCAAGGC | 1297 | 1497 | GCCUUGCCCACCAGCACAC | 1421 |
| 1497 | CGGCUGCCACGGGCAGCGG | 1298 | 1497 | CGGCUGCCACGGGCAGCGG | 1298 | 1515 | CCGCUGCCCGUGGCAGCCG | 1422 |
| 1515 | GGGACUGGAAUACCACGCU | 1299 | 1515 | GGGACUGGAAUACCACGCU | 1299 | 1533 | AGCGUGGUAUUCCAGUCCC | 1423 |
| 1533 | UGGCCUGCUUCGUGGCCAU | 1300 | 1533 | UGGCCUGCUUCGUGGCCAU | 1300 | 1551 | AUGGCCACGAAGCAGGCCA | 1424 |
| 1551 | UCCUCAUUGGCUUGUGUCU | 1301 | 1551 | UCCUCAUUGGCUUGUGUCU | 1301 | 1569 | AGACACAAGCCAAUGAGGA | 1425 |
| 1569 | UGACCCUCCUGCUGCUUGC | 1302 | 1569 | UGACCCUCCUGCUGCUUGC | 1302 | 1587 | GCAAGCAGCAGGAGGGUCA | 1426 |
| 1587 | CUGUGUUCAAGAAGGCGCU | 1303 | 1587 | CUGUGUUCAAGAAGGCGCU | 1303 | 1605 | AGCGCCUUCUUGAACACAG | 1427 |
| 1605 | UGCCCGCCCUCCCCAUCUC | 1304 | 1605 | UGCCCGCCCUCCCCAUCUC | 1304 | 1623 | GAGAUGGGGAGGGCGGGCA | 1428 |
| 1623 | CCAUCACGUUCGGGCUCAU | 1305 | 1623 | CCAUCACGUUCGGGCUCAU | 1305 | 1641 | AUGAGCCCGAACGUGAUGG | 1429 |
| 1641 | UCUUUUACUUCUCCACGGA | 1306 | 1641 | UCUUUUACUUCUCCACGGA | 1306 | 1659 | UCCGUGGAGAAGUAAAAGA | 1430 |
| 1659 | ACAACCUGGUGCGGCCGUU | 1307 | 1659 | ACAACCUGGUGCGGCCGUU | 1307 | 1677 | AACGGCCGCACCAGGUUGU | 1431 |
| 1677 | UCAUGGACACCCUGGCCUC | 1308 | 1677 | UCAUGGACACCCUGGCCUC | 1308 | 1695 | GAGGCCAGGGUGUCCAUGA | 1432 |
| 1695 | CCCAUCAGCUCUACAUCUG | 1309 | 1695 | CCCAUCAGCUCUACAUCUG | 1309 | 1713 | CAGAUGUAGAGCUGAUGGG | 1433 |
| 1713 | GAGGGACAUGGUGUGCCAC | 1310 | 1713 | GAGGGACAUGGUGUGCCAC | 1310 | 1731 | GUGGCACACCAUGUCCCUC | 1434 |
| 1731 | CAGGCUGCAAGCUGCAGGG | 1311 | 1731 | CAGGCUGCAAGCUGCAGGG | 1311 | 1749 | CCCUGCAGCUUGCAGCCUG | 1435 |
| 1749 | GAAUUUUCAUUGGAUGCAG | 1312 | 1749 | GAAUUUUCAUUGGAUGCAG | 1312 | 1767 | CUGCAUCCAAUGAAAAUUC | 1436 |
| 1767 | GUUGUAUAGUUUUACACUC | 1313 | 1767 | GUUGUAUAGUUUUACACUC | 1313 | 1785 | GAGUGUAAAACUAUACAAC | 1437 |
| 1785 | CUAGUGCCAUAUAUUUUUA | 1314 | 1785 | CUAGUGCCAUAUAUUUUUA | 1314 | 1803 | UAAAAAUAUAUGGCACUAG | 1438 |
| 1803 | AAGACUUUUCUUUCCUUAA | 1315 | 1803 | AAGACUUUUCUUUCCUUAA | 1315 | 1821 | UUAAGGAAAGAAAAGUCUU | 1439 |
| 1821 | AAAAAUAAAGUACGUGUUU | 1316 | 1821 | AAAAAUAAAGUACGUGUUU | 1316 | 1839 | AAACACGUACUUUAUUUUU | 1440 |
| 1839 | UACUUGGUGAGGAGGAGGC | 1317 | 1839 | UACUUGGUGAGGAGGAGGC | 1317 | 1857 | GCCUCCUCCUCACCAAGUA | 1441 |
| 1857 | CAGAACCAGCUCUUUGGUG | 1318 | 1857 | CAGAACCAGCUCUUUGGUG | 1318 | 1875 | CACCAAAGAGCUGGUUCUG | 1442 |
| 1875 | GCCAGCUGUUUCAUCACCA | 1319 | 1875 | GCCAGCUGUUUCAUCACCA | 1319 | 1893 | UGGUGAUGAAACAGCUGGC | 1443 |
| 1893 | AGACUUUGGCUCCCGCUUU | 1320 | 1893 | AGACUUUGGCUCCCGCUUU | 1320 | 1911 | AAAGCGGGAGCCAAAGUCU | 1444 |
| 1911 | UGGGGAGCGCCUCGCUUCA | 1321 | 1911 | UGGGGAGCGCCUCGCUUCA | 1321 | 1929 | UGAAGCGAGGCGCUCCCCA | 1445 |
| 1929 | ACGGACAGGAAGCACAGCA | 1322 | 1929 | ACGGACAGGAAGCACAGCA | 1322 | 1947 | UGCUGUGCUUCCUGUCCGU | 1446 |
| 1947 | AGGUUUAUCCAGAUGAACU | 1323 | 1947 | AGGUUUAUCCAGAUGAACU | 1323 | 1965 | AGUUCAUCUGGAUAAACCU | 1447 |
| 1965 | UGAGAAGGUCAGAUUAGGG | 1324 | 1965 | UGAGAAGGUCAGAUUAGGG | 1324 | 1983 | CCCUAAUCUGACCUUCUCA | 1448 |
| 1983 | GCGGGGAGAAGAGCAUCCG | 1325 | 1983 | GCGGGGAGAAGAGCAUCCG | 1325 | 2001 | CGGAUGCUCUUCUCCCCGC | 1449 |
| 2001 | GGCAUGAGGGCUGAGAUGC | 1326 | 2001 | GGCAUGAGGGCUGAGAUGC | 1326 | 2019 | GCAUCUCAGCCCUCAUGCC | 1450 |
| 2019 | CGCAAAGAGUGUGCUCGGG | 1327 | 2019 | CGCAAAGAGUGUGCUCGGG | 1327 | 2037 | CCCGAGCACACUCUUUGCG | 1451 |
| 2037 | GAGUGGCCCCUGGCACCUG | 1328 | 2037 | GAGUGGCCCCUGGCACCUG | 1328 | 2055 | CAGGUGCCAGGGGCCACUC | 1452 |
| 2055 | GGGUGCUCUGGCUGGAGAG | 1329 | 2055 | GGGUGCUCUGGCUGGAGAG | 1329 | 2073 | CUCUCCAGCCAGAGCACCC | 1453 |
| 2073 | GGAAAAGCCAGUUCCCUAC | 1330 | 2073 | GGAAAAGCCAGUUCCCUAC | 1330 | 2091 | GUAGGGAACUGGCUUUUCC | 1454 |
| 2091 | CGAGGAGUGUUCCCAAUGC | 1331 | 2091 | CGAGGAGUGUUCCCAAUGC | 1331 | 2109 | GCAUUGGGAACACUCCUCG | 1455 |
| 2109 | CUUUGUCCAUGAUGUCCUU | 1332 | 2109 | CUUUGUCCAUGAUGUCCUU | 1332 | 2127 | AAGGACAUCAUGGACAAAG | 1456 |
| 2127 | UGUUAUUUUAUUGCCUUUA | 1333 | 2127 | UGUUAUUUUAUUGCCUUUA | 1333 | 2145 | UAAAGGCAAUAAAAUAACA | 1457 |
| 2145 | AGAAACUGAGUCCUGUUCU | 1334 | 2145 | AGAAACUGAGUCCUGUUCU | 1334 | 2163 | AGAACAGGACUCAGUUUCU | 1458 |
| 2163 | UUGUUACGGCAGUCACACU | 1335 | 2163 | UUGUUACGGCAGUCACACU | 1335 | 2181 | AGUGUGACUGCCGUAACAA | 1459 |
| 2181 | UGCUGGGAAGUGGCUUAAU | 1336 | 2181 | UGCUGGGAAGUGGCUUAAU | 1336 | 2199 | AUUAAGCCACUUCCCAGCA | 1460 |
| 2199 | UAGUAAUAUCAAUAAAUAG | 1337 | 2199 | UAGUAAUAUCAAUAAAUAG | 1337 | 2217 | CUAUUUAUUGAUAUUACUA | 1461 |
| 2216 | AGAUGAGUCCUGUUAGAAA | 1338 | 2216 | AGAUGAGUCCUGUUAGAAA | 1338 | 2234 | UUUCUAACAGGACUCAUCU | 1462 |

The 3′-ends of the Upper sequence and the Lower sequence of the siNA construct can include an overhang sequence, for example about 1, 2, 3, or 4 nucleotides in length, preferably 2 nucleotides in length, wherein the overhanging sequence of the lower sequence is optionally complementary to a portion of the target sequence.
The upper sequence is also referred to as the sense strand, whereas the lower sequence is also referred to as the antisense strand.
The upper and lower sequences in the Table can further comprise a chemical modification having Formulae I-VII or any combination thereof.

[0421] TABLE III

APP, BACE, PSEN1, PSEN2, SYNTHETIC MODIFIED siNA CONSTRUCTS

| | | | |
|---|---|---|---|
| Target | Seq | Cmpd | Seq |

| | | | | | | |
|---|---|---|---|---|---|---|
| Pos | Target | ID | # | Aliases | Sequence | ID |

APP

| | | | | | | |
|---|---|---|---|---|---|---|
| 791 | CAGACUAUGCAGAUGGGAGUGAA | 1463 | | APP:793U21 sense siNA | GACUAUGCAGAUGGGAGUGTT | 1495 |
| 829 | GUAGCAGAGGAGGAAGAAGUGGC | 1464 | | APP:831U21 sense siNA | AGCAGAGGAGGAAGAAGUGTT | 1496 |
| 851 | CUGAGGUGGAAGAAGAAGAAGCC | 1465 | | APP:853U21 sense siNA | GAGGUGGAAGAAGAAGAAGTT | 1497 |
| 1356 | AGAGAGAAUGUCCCAGGUCAUGA | 1466 | | APP:1358U21 sense siNA | AGAGAAUGUCCCAGGUCAUTT | 1498 |
| 1568 | AGAACUACAUCACCGCUCUGCAG | 1467 | | APP:1570U21 sense siNA | AACUACAUCACCGCUCUGCTT | 1499 |
| 2012 | AUUCUUUUGGGGCUGACUCUGUG | 1468 | | APP:2014U21 sense siNA | UCUUUUGGGGCUGACUCUGTT | 1500 |
| 2481 | UGAAGUUGGACAGCAAAACCAUU | 1469 | | APP:2483U21 sense siNA | AAGUUGGACAGCAAAACCATT | 1501 |
| 2482 | GAAGUUGGACAGCAAAACCAUUG | 1470 | | APP:2484U21 sense siNA | AGUUGGACAGCAAAACCAUTT | 1502 |
| 791 | CAGACUAUGCAGAUGGGAGUGAA | 1463 | | APP:811L21 antisense siNA | CACUCCCAUCUGCAUAGUCTT | 1503 |
| | | | | (793C) | | |
| 829 | GUAGCAGAGGAGGAAGAAGUGGC | 1464 | | APP:849L21 antisense siNA | CACUUCUUCCUCCUCUGCUTT | 1504 |
| | | | | (831C) | | |
| 851 | CUGAGGUGGAAGAAGAAGAAGCC | 1465 | | APP:871L21 antisense siNA | CUUCUUCUUCUUCCACCUCTT | 1505 |
| | | | | (853C) | | |
| 1356 | AGAGAGAAUGUCCCAGGUCAUGA | 1466 | | APP:1376L21 antisense siNA | AUGACCUGGGACAUUCUCUTT | 1506 |
| | | | | (1358C) | | |
| 1568 | AGAACUACAUCACCGCUCUGCAG | 1467 | | APP:1588L21 antisense siNA | GCAGAGCGGUGAUGUAGUUTT | 1507 |
| | | | | (1570C) | | |
| 2012 | AUUCUUUUGGGGCUGACUCUGUG | 1468 | | APP:2032L21 antisense siNA | CAGAGUCAGCCCCAAAAGATT | 1508 |
| | | | | (2014C) | | |
| 2481 | UGAAGUUGGACAGCAAAACCAUU | 1469 | | APP:2501L21 antisense siNA | UGGUUUUGCUGUCCAACUUTT | 1509 |
| | | | | (2483C) | | |
| 2482 | GAAGUUGGACAGCAAAACCAUUG | 1470 | | APP:2502L21 antisense siNA | AUGGUUUUGCUGUCCAACUTT | 1510 |
| | | | | (2484C) | | |
| 791 | CAGACUAUGCAGAUGGGAGUGAA | 1463 | | APP:793U21 sense siNA stab04 | B GAcuAuGcAGAuGGGAGuGTT B | 1511 |
| 829 | GUAGCAGAGGAGGAAGAAGUGGC | 1464 | | APP:831U21 sense siNA stab04 | B AGcAGAGGAGGAAGAAGuGTT B | 1512 |
| 851 | CUGAGGUGGAAGAAGAAGAAGCC | 1465 | | APP:853U21 sense siNA stab04 | B GAGGuGGAAGAAGAAGAAGTT B | 1513 |
| 1356 | AGAGAGAAUGUCCCAGGUCAUGA | 1466 | | APP:1358U21 sense siNA stab04 | B AGAGAAuGucccAGGucAuTT B | 1514 |
| 1568 | AGAACUACAUCACCGCUCUGCAG | 1467 | | APP:1570U21 sense siNA stab04 | B AAcuAcAucAccGcucuGcTT B | 1515 |
| 2012 | AUUCUUUUGGGGCUGACUCUGUG | 1468 | | APP:2014U21 sense siNA stab04 | B ucuuuuGGGGcuGAcucuGTT B | 1516 |
| 2481 | UGAAGUUGGACAGCAAAACCAUU | 1469 | | APP:2483U21 sense siNA stab04 | B AAGuuGGAcAGcAAAAccATT B | 1517 |
| 2482 | GAAGUUGGACAGCAAAACCAUUG | 1470 | | APP:2484U21 sense siNA stab04 | B AGuuGGAcAGcAAAAccAuTT B | 1518 |
| 791 | CAGACUAUGCAGAUGGGAGUGAA | 1463 | | APP:811L21 antisense siNA | cAcucccAucuGcAuAGucTsT | 1519 |
| | | | | (793C) stab05 | | |
| 829 | GUAGCAGAGGAGGAAGAAGUGGC | 1464 | | APP:849L21 antisense siNA | cAcuucuuccuccucuGcuTsT | 1520 |
| | | | | (831C) stab05 | | |
| 851 | CUGAGGUGGAAGAAGAAGAAGCC | 1465 | | APP:871L21 antisense siNA | cuucuucuucuuccAccucTsT | 1521 |
| | | | | (853C) stab05 | | |
| 1356 | AGAGAGAAUGUCCCAGGUCAUGA | 1466 | | APP:1376L21 antisense siNA | AuGAccuGGGAcAuucucuTsT | 1522 |
| | | | | (1358C) stab05 | | |
| 1568 | AGAACUACAUCACCGCUCUGCAG | 1467 | | APP:1588L21 antisense siNA | GcAGAGcGGuGAuGuAGuuTsT | 1523 |
| | | | | (1570C) stab05 | | |
| 2012 | AUUCUUUUGGGGCUGACUCUGUG | 1468 | | APP:2032L21 antisense siNA | cAGAGucAGccccAAAAGATsT | 1524 |
| | | | | (2014C) stab05 | | |
| 2481 | UGAAGUUGGACAGCAAAACCAUU | 1469 | | APP:2501L21 antisense siNA | uGGuuuuGcuGuccAAcuuTsT | 1525 |
| | | | | (2483C) stab05 | | |
| 2482 | GAAGUUGGACAGCAAAACCAUUG | 1470 | | APP:2502L21 antisense siNA | AuGGuuuuGcuGuccAAcuTsT | 1526 |
| | | | | (2484C) stab05 | | |
| 791 | CAGACUAUGCAGAUGGGAGUGAA | 1463 | | APP:793U21 sense siNA stab07 | B GAcuAuGcAGAuGGGAGuGTT B | 1527 |
| 829 | GUAGCAGAGGAGGAAGAAGUGGC | 1464 | | APP:831U21 sense siNA stab07 | B AGcAGAGGAGGAAGAAGuGTT B | 1528 |
| 851 | CUGAGGUGGAAGAAGAAGAAGCC | 1465 | | APP:853U21 sense siNA stab07 | B GAGGuGGAAGAAGAAGAAGTT B | 1529 |
| 1356 | AGAGAGAAUGUCCCAGGUCAUGA | 1466 | | APP:1358U21 sense siNA stab07 | B AGAGAAuGucccAGGucAuTT B | 1530 |
| 1568 | AGAACUACAUCACCGCUCUGCAG | 1467 | | APP:1570U21 sense siNA stab07 | B AAcuAcAucAccGcucuGcTT B | 1531 |
| 2012 | AUUCUUUUGGGGCUGACUCUGUG | 1468 | | APP:2014U21 sense siNA stab07 | B ucuuuuGGGGcuGAcucuGTT B | 1532 |
| 2481 | UGAAGUUGGACAGCAAAACCAUU | 1469 | | APP:2483U21 sense siNA stab07 | B AAGuuGGAcAGcAAAAccATT B | 1533 |
| 2482 | GAAGUUGGACAGCAAAACCAUUG | 1470 | | APP:2484U21 sense siNA stab07 | B AGuuGGAcAGcAAAAccAuTT B | 1534 |
| 791 | CAGACUAUGCAGAUGGGAGUGAA | 1463 | | APP:811L21 antisense siNA | cAcucccAucuGcAuAGucTsT | 1535 |
| | | | | (793C) stab11 | | |
| 829 | GUAGCAGAGGAGGAAGAAGUGGC | 1464 | | APP:849L21 antisense siNA | cAcuucuuccuccucuGcuTsT | 1536 |
| | | | | (831C) stab11 | | |
| 851 | CUGAGGUGGAAGAAGAAGAAGCC | 1465 | | APP:871L21 antisense siNA | cuucuucuucuuccAccucTsT | 1537 |
| | | | | (853C) stab11 | | |
| 1356 | AGAGAGAAUGUCCCAGGUCAUGA | 1466 | | APP:1376L21 antisense siNA | AuGAccuGGGAcAuucucuTsT | 1538 |
| | | | | (1358C) stab11 | | |
| 1568 | AGAACUACAUCACCGCUCUGCAG | 1467 | | APP:1588L21 antisense siNA | GcAGAGcGGuGAuGuAGuuTsT | 1539 |
| | | | | (1570C) stab11 | | |
| 2012 | AUUCUUUUGGGGCUGACUCUGUG | 1468 | | APP:2032L21 antisense siNA | cAGAGucAGccccAAAAGATsT | 1540 |
| | | | | (2014C) stab11 | | |
| 2481 | UGAAGUUGGACAGCAAAACCAUU | 1469 | | APP:2501L21 antisense siNA | uGGuuuuGcuGuccAAcuuTsT | 1541 |
| | | | | (2483C) stab11 | | |
| 2482 | GAAGUUGGACAGCAAAACCAUUG | 1470 | | APP:2502L21 antisense siNA | AuGGuuuuGcuGuccAAcuTsT | 1542 |
| | | | | (2484C) stab11 | | |
| 791 | CAGACUAUGCAGAUGGGAGUGAA | 1463 | | APP:793U21 sense siNA stab18 | B GAcuAuGcAGAuGGGAGuGTT B | 1543 |
| 829 | GUAGCAGAGGAGGAAGAAGUGGC | 1464 | | APP:831U21 sense siNA stab18 | B AGcAGAGGAGGAAGAAGuGTT B | 1544 |
| 851 | CUGAGGUGGAAGAAGAAGAAGCC | 1465 | | APP:853U21 sense siNA stab18 | B GAGGuGGAAGAAGAAGAAGTT B | 1545 |
| 1356 | AGAGAGAAUGUCCCAGGUCAUGA | 1466 | | APP:1358U21 sense siNA stab18 | B AGAGAAuGucccAGGucAuTT B | 1546 |
| 1568 | AGAACUACAUCACCGCUCUGCAG | 1467 | | APP:1570U21 sense siNA stab18 | B AAcuAcAucAccGcucuGcTT B | 1547 |
| 2012 | AUUCUUUUGGGGCUGACUCUGUG | 1468 | | APP:2014U21 sense siNA stab18 | B ucuuuuGGGGcuGAcucuGTT B | 1548 |
| 2481 | UGAAGUUGGACAGCAAAACCAUU | 1469 | | APP:2483U21 sense siNA stab18 | B AAGuuGGAcAGcAAAAccATT B | 1549 |
| 2482 | GAAGUUGGACAGCAAAACCAUUG | 1470 | | APP:2484U21 sense siNA stab18 | B AGuuGGAcAGcAAAAccAuTT B | 1550 |
| 791 | CAGACUAUGCAGAUGGGAGUGAA | 1463 | 33885 | APP:811L21 antisense siNA | cAcucccAucuGcAuAGucTsT | 1551 |
| | | | | (793C) stab08 | | |
| 829 | GUAGCAGAGGAGGAAGAAGUGGC | 1464 | 33886 | APP:849L21 antisense siNA | cAcuucuuccuccucuGcuTsT | 1552 |
| | | | | (831C) stab08 | | |
| 851 | CUGAGGUGGAAGAAGAAGAAGCC | 1465 | 33887 | APP:871L21 antisense siNA | cuucuucuucuuccAccucTsT | 1553 |
| | | | | (853C) stab08 | | |
| 1356 | AGAGAGAAUGUCCCAGGUCAUGA | 1466 | 33888 | APP:1376L21 antisense siNA | AuGAccuGGGAcAuucucuTsT | 1554 |
| | | | | (1358C) stab08 | | |
| 1568 | AGAACUACAUCACCGCUCUGCAG | 1467 | 33889 | APP:1588L21 antisense siNA | GcAGAGcGGuGAuGuAGuuTsT | 1555 |
| | | | | (1570C) stab08 | | |
| 2012 | AUUCUUUUGGGGCUGACUCUGUG | 1468 | 33890 | APP:2032L21 antisense siNA | cAGAGucAGccccAAAAGATsT | 1556 |
| | | | | (2014C) stab08 | | |
| 2481 | UGAAGUUGGACAGCAAAACCAUU | 1469 | 33891 | APP:2501L21 antisense siNA | uGGuuuuGcuGuccAAcuuTsT | 1557 |
| | | | | (2483C) stab08 | | |
| 2482 | GAAGUUGGACAGCAAAACCAUUG | 1470 | 33892 | APP:2502L21 antisense siNA | AuGGuuuuGcuGuccAAcuTsT | 1558 |
| | | | | (2484C) stab08 | | |
| 791 | CAGACUAUGCAGAUGGGAGUGAA | 1463 | 33869 | APP:793U21 sense siNA stab09 | B GACUAUGCAGAUGGGAGUGTT B | 1559 |
| 829 | GUAGCAGAGGAGGAAGAAGUGGC | 1464 | 33870 | APP:831U21 sense siNA stab09 | B AGCAGAGGAGGAAGAAGUGTT B | 1560 |
| 851 | CUGAGGUGGAAGAAGAAGAAGCC | 1465 | 33871 | APP:853U21 sense siNA stab09 | B GAGGUGGAAGAAGAAGAAGTT B | 1561 |
| 1356 | AGAGAGAAUGUCCCAGGUCAUGA | 1466 | 33872 | APP:1358U21 sense siNA stab09 | B AGAGAAUGUCCCAGGUCAUTT B | 1562 |
| 1568 | AGAACUACAUCACCGCUCUGCAG | 1467 | 33873 | APP:1570U21 sense siNA stab09 | B AACUACAUCACCGCUCUGCTT B | 1563 |
| 2012 | AUUCUUUUGGGGCUGACUCUGUG | 1468 | 33874 | APP:2014U21 sense siNA stab09 | B UCUUUUGGGGCUGACUCUGTT B | 1564 |
| 2481 | UGAAGUUGGACAGCAAAACCAUU | 1469 | 33875 | APP:2483U21 sense siNA stab09 | B AAGUUGGACAGCAAAACCATT B | 1565 |
| 2482 | GAAGUUGGACAGCAAAACCAUUG | 1470 | 33876 | APP:2484U21 sense siNA stab09 | B AGUUGGACAGCAAAACCAUTT B | 1566 |
| 791 | CAGACUAUGCAGAUGGGAGUGAA | 1463 | 33877 | APP:811L21 antisense siNA | CACUCCCAUCUGCAUAGUCTsT | 1567 |
| | | | | (793C) stab10 | | |
| 829 | GUAGCAGAGGAGGAAGAAGUGGC | 1464 | 33878 | APP:849L21 antisense siNA | CACUUCUUCCUCCUCUGCUTsT | 1568 |
| | | | | (831C) stab10 | | |
| 851 | CUGAGGUGGAAGAAGAAGAAGCC | 1465 | 33879 | APP:871L21 antisense siNA | CUUCUUCUUCUUCCACCUCTsT | 1569 |
| | | | | (853C) stab10 | | |
| 1356 | AGAGAGAAUGUCCCAGGUCAUGA | 1466 | 33880 | APP:1376L21 antisense siNA | AUGACCUGGGACAUUCUCUTsT | 1570 |
| | | | | (1358C) stab10 | | |
| 1568 | AGAACUACAUCACCGCUCUGCAG | 1467 | 33881 | APP:1588L21 antisense siNA | GCAGAGCGGUGAUGUAGUUTsT | 1571 |
| | | | | (1570C) stab10 | | |
| 2012 | AUUCUUUUGGGGCUGACUCUGUG | 1468 | 33882 | APP:2032L21 antisense siNA | CAGAGUCAGCCCCAAAAGATsT | 1572 |
| | | | | (2014C) stab10 | | |
| 2481 | UGAAGUUGGACAGCAAAACCAUU | 1469 | 33883 | APP:2501L21 antisense siNA | UGGUUUUGCUGUCCAACUUTsT | 1573 |
| | | | | (2483C) stab10 | | |
| 2482 | GAAGUUGGACAGCAAAACCAUUG | 1470 | 33884 | APP:2502L21 antisense siNA | AUGGUUUUGCUGUCCAACUTsT | 1574 |
| | | | | (2484C) stab10 | | |
| 791 | CAGACUAUGCAGAUGGGAGUGAA | 1463 | | APP:811L21 antisense siNA | cAcucccAucuGcAuAGucTT B | 1575 |
| | | | | (793C) stab19 | | |
| 829 | GUAGCAGAGGAGGAAGAAGUGGC | 1464 | | APP:849L21 antisense siNA | cAcuucuuccuccucuGcuTT B | 1576 |
| | | | | (831C) stab19 | | |
| 851 | CUGAGGUGGAAGAAGAAGAAGCC | 1465 | | APP:871L21 antisense siNA | cuucuucuucuuccAccucTT B | 1577 |
| | | | | (853C) stab19 | | |
| 1356 | AGAGAGAAUGUCCCAGGUCAUGA | 1466 | | APP:1376L21 antisense siNA | AuGAccuGGGAcAuucucuTT B | 1578 |
| | | | | (1358C) stab19 | | |
| 1568 | AGAACUACAUCACCGCUCUGCAG | 1467 | | APP:1588L21 antisense siNA | GcAGAGcGGuGAuGuAGuuTT B | 1579 |
| | | | | (1570C) stab19 | | |
| 2012 | AUUCUUUUGGGGCUGACUCUGUG | 1468 | | APP:2032L21 antisense siNA | cAGAGucAGccccAAAAGATT B | 1580 |
| | | | | (2014C) stab19 | | |
| 2481 | UGAAGUUGGACAGCAAAACCAUU | 1469 | | APP:2501L21 antisense siNA | uGGuuuuGcuGuccAAcuuTT B | 1581 |
| | | | | (2483C) stab19 | | |
| 2482 | GAAGUUGGACAGCAAAACCAUUG | 1470 | | APP:2502L21 antisense siNA | AuGGuuuuGcuGuccAAcuTT B | 1582 |
| | | | | (2484C) stab19 | | |
| 791 | CAGACUAUGCAGAUGGGAGUGAA | 1463 | | APP:811L21 antisense siNA | CACUCCCAUCUGCAUAGUCTT B | 1583 |
| | | | | (793C) stab22 | | |
| 829 | GUAGCAGAGGAGGAAGAAGUGGC | 1464 | | APP:849L21 antisense siNA | CACUUCUUCCUCCUCUGCUTT B | 1584 |
| | | | | (831C) stab22 | | |
| 851 | CUGAGGUGGAAGAAGAAGAAGCC | 1465 | | APP:871L21 antisense siNA | CUUCUUCUUCUUCCACCUCTT B | 1585 |
| | | | | (853C) stab22 | | |
| 1356 | AGAGAGAAUGUCCCAGGUCAUGA | 1466 | | APP:1376L21 antisense siNA | AUGACCUGGGACAUUCUCUTT B | 1586 |
| | | | | (1358C) stab22 | | |
| 1568 | AGAACUACAUCACCGCUCUGCAG | 1467 | | APP:1588L21 antisense siNA | GCAGAGCGGUGAUGUAGUUTT B | 1587 |
| | | | | (1570C) stab22 | | |
| 2012 | AUUCUUUUGGGGCUGACUCUGUG | 1468 | | APP:2032L21 antisense siNA | CAGAGUCAGCCCCAAAAGATT B | 1588 |
| | | | | (2014C) stab22 | | |
| 2481 | UGAAGUUGGACAGCAAAACCAUU | 1469 | | APP:2501L21 antisense siNA | UGGUUUUGCUGUCCAACUUTT B | 1589 |
| | | | | (2483C) stab22 | | |
| 2482 | GAAGUUGGACAGCAAAACCAUUG | 1470 | | APP:2502L21 antisense siNA | AUGGUUUUGCUGUCCAACUTT B | 1590 |
| | | | | (2484C) stab22 | | |

BACE

| | | | | | | |
|---|---|---|---|---|---|---|
| 1025 | CCUGGAGCCUUUCUUUGACUCUC | 1471 | | BACE:1027U21 sense siNA | UGGAGCCUUUCUUUGACUCTT | 1591 |
| 1028 | GGAGCCUUUCUUUGACUCUCUGG | 1472 | | BACE:1030U21 sense siNA | AGCCUUUCUUUGACUCUCUTT | 1592 |
| 1393 | AGAAGUUCCCUGAUGGUUUCUGG | 1473 | | BACE:1395U21 sense siNA | AAGUUCCCUGAUGGUUUCUTT | 1593 |
| 1490 | AAUGGGUGAGGUUACCAACCAGU | 1474 | 31005 | BACE:1492U21 sense siNA | UGGGUGAGGUUACCAACCATT | 1594 |
| 1753 | UCACCUUGGACAUGGAAGACUGU | 1475 | 31006 | BACE:1755U21 sense siNA | ACCUUGGACAUGGAAGACUTT | 1595 |
| 1803 | UCAACCCUCAUGACCAUAGCCUA | 1476 | | BACE:1805U21 sense siNA | AACCCUCAUGACCAUAGCCTT | 1596 |
| 2457 | CCUAACAUUGGUGCAAAGAUUGC | 1477 | 31007 | BACE:2459U21 sense siNA | UAACAUUGGUGCAAAGAUUTT | 1597 |
| 3583 | UAUGGGACCUGCUAAGUGUGGAA | 1478 | 31008 | BACE:3585U21 sense siNA | UGGGACCUGCUAAGUGUGGTT | 1598 |
| 1025 | CCUGGAGCCUUUCUUUGACUCUC | 1471 | | BACE:1045L21 antisense siNA | GAGUCAAAGAAAGGCUCCATT | 1599 |
| | | | | (1027C) | | |
| 1028 | GGAGCCUUUCUUUGACUCUCUGG | 1472 | | BACE:1048L21 antisense siNA | AGAGAGUCAAAGAAAGGCUTT | 1600 |
| | | | | (1030C) | | |
| 1393 | AGAAGUUCCCUGAUGGUUUCUGG | 1473 | | BACE:1413L21 antisense siNA | AGAAACCAUCAGGGAACUUTT | 1601 |
| | | | | (1395C) | | |
| 1490 | AAUGGGUGAGGUUACCAACCAGU | 1474 | 31081 | BACE:1510L21 antisense siNA | UGGUUGGUAACCUCACCCATT | 1602 |
| | | | | (1492C) | | |
| 1753 | UCACCUUGGACAUGGAAGACUGU | 1475 | 31082 | BACE:1773L21 antisense siNA | AGUCUUCCAUGUCCAAGGUTT | 1603 |
| | | | | (1755C) | | |
| 1803 | UCAACCCUCAUGACCAUAGCCUA | 1476 | | BACE:1823L21 antisense siNA | GGCUAUGGUCAUGAGGGUUTT | 1604 |
| | | | | (1805C) | | |
| 2457 | CCUAACAUUGGUGCAAAGAUUGC | 1477 | 31083 | BACE:2477L21 antisense siNA | AAUCUUUGCACCAAUGUUATT | 1605 |
| | | | | (2459C) | | |
| 3583 | UAUGGGACCUGCUAAGUGUGGAA | 1478 | 31084 | BACE:3603L21 antisense siNA | CCACACUUAGCAGGUCCCATT | 1606 |
| | | | | (3585C) | | |
| 1025 | CCUGGAGCCUUUCUUUGACUCUC | 1471 | | BACE:1027U21 sense siNA stab04 | B uGGAGccuuucuuuGAcucTT B | 1607 |
| 1028 | GGAGCCUUUCUUUGACUCUCUGG | 1472 | | BACE:1030U21 sense siNA stab04 | B AGccuuucuuuGAcucucuTT B | 1608 |
| 1393 | AGAAGUUCCCUGAUGGUUUCUGG | 1473 | | BACE:1395U21 sense siNA stab04 | B AAGuucccuGAuGGuuucuTT B | 1609 |
| 1490 | AAUGGGUGAGGUUACCAACCAGU | 1474 | 30729 | BACE:1492U21 sense siNA stab04 | B uGGGuGAGGuuAccAAccATT B | 1610 |
| 1753 | UCACCUUGGACAUGGAAGACUGU | 1475 | 30730 | BACE:1755U21 sense siNA stab04 | B AccuuGGAcAuGGAAGAcuTT B | 1611 |
| 1803 | UCAACCCUCAUGACCAUAGCCUA | 1476 | | BACE:1805U21 sense siNA stab04 | B AAcccucAuGAccAuAGccTT B | 1612 |
| 2457 | CCUAACAUUGGUGCAAAGAUUGC | 1477 | 31378 | BACE:2459U21 sense siNA stab04 | B uAAcAuuGGuGcAAAGAuuTT B | 1613 |
| 3583 | UAUGGGACCUGCUAAGUGUGGAA | 1478 | 30732 | BACE:3585U21 sense siNA stab04 | B uGGGAccuGcuAAGuGuGGTT B | 1614 |
| 1025 | CCUGGAGCCUUUCUUUGACUCUC | 1471 | | BACE:1045L21 antisense siNA | GAGucAAAGAAAGGcuccATsT | 1615 |
| | | | | (1027C) stab05 | | |
| 1028 | GGAGCCUUUCUUUGACUCUCUGG | 1472 | | BACE:1048L21 antisense siNA | AGAGAGucAAAGAAAGGcuTsT | 1616 |
| | | | | (1030C) stab05 | | |
| 1393 | AGAAGUUCCCUGAUGGUUUCUGG | 1473 | | BACE:1413L21 antisense siNA | AGAAAccAucAGGGAAcuuTsT | 1617 |
| | | | | (1395C) stab05 | | |
| 1490 | AAUGGGUGAGGUUACCAACCAGU | 1474 | 30733 | BACE:1510L21 antisense siNA | uGGuuGGuAAccucAcccATsT | 1618 |
| | | | | (1492C) stab05 | | |
| 1753 | UCACCUUGGACAUGGAAGACUGU | 1475 | 30734 | BACE:1773L21 antisense siNA | AGucuuccAuGuccAAGGuTsT | 1619 |
| | | | | (1755C) stab05 | | |
| 1803 | UCAACCCUCAUGACCAUAGCCUA | 1476 | | BACE:1823L21 antisense siNA | GGcuAuGGucAuGAGGGuuTsT | 1620 |
| | | | | (1805C) stab05 | | |
| 2457 | CCUAACAUUGGUGCAAAGAUUGC | 1477 | 31381 | BACE:2477L21 antisense siNA | AAucuuuGcAccAAuGuuATsT | 1621 |
| | | | | (2459C) stab05 | | |
| 3583 | UAUGGGACCUGCUAAGUGUGGAA | 1478 | 30736 | BACE:3603L21 antisense siNA | ccAcAcuuAGcAGGucccATsT | 1622 |
| | | | | (3585C) stab05 | | |
| 1025 | CCUGGAGCCUUUCUUUGACUCUC | 1471 | | BACE:1027U21 sense siNA stab07 | B uGGAGccuuucuuuGAcucTT B | 1623 |
| 1028 | GGAGCCUUUCUUUGACUCUCUGG | 1472 | | BACE:1030U21 sense siNA stab07 | B AGccuuucuuuGAcucucuTT B | 1624 |
| 1393 | AGAAGUUCCCUGAUGGUUUCUGG | 1473 | | BACE:1395U21 sense siNA stab07 | B AAGuucccuGAuGGuuucuTT B | 1625 |
| 1490 | AAUGGGUGAGGUUACCAACCAGU | 1474 | | BACE:1492U21 sense siNA stab07 | B uGGGuGAGGuuAccAAccATT B | 1626 |
| 1753 | UCACCUUGGACAUGGAAGACUGU | 1475 | | BACE:1755U21 sense siNA stab07 | B AccuuGGAcAuGGAAGAcuTT B | 1627 |
| 1803 | UCAACCCUCAUGACCAUAGCCUA | 1476 | | BACE:1805U21 sense siNA stab07 | B AAcccucAuGAccAuAGccTT B | 1628 |
| 2457 | CCUAACAUUGGUGCAAAGAUUGC | 1477 | 31384 | BACE:2459U21 sense siNA stab07 | B uAAcAuuGGuGcAAAGAuuTT B | 1629 |
| 3583 | UAUGGGACCUGCUAAGUGUGGAA | 1478 | | BACE:3585U21 sense siNA stab07 | B uGGGAccuGcuAAGuGuGGTT B | 1630 |
| 1025 | CCUGGAGCCUUUCUUUGACUCUC | 1471 | | BACE:1045L21 antisense siNA | GAGucAAAGAAAGGcuccATsT | 1631 |
| | | | | (1027C) stab11 | | |
| 1028 | GGAGCCUUUCUUUGACUCUCUGG | 1472 | | BACE:1048L21 antisense siNA | AGAGAGucAAAGAAAGGcuTsT | 1632 |
| | | | | (1030C) stab11 | | |
| 1393 | AGAAGUUCCCUGAUGGUUUCUGG | 1473 | | BACE:1413L21 antisense siNA | AGAAAccAucAGGGAAcuuTsT | 1633 |
| | | | | (1395C) stab11 | | |
| 1490 | AAUGGGUGAGGUUACCAACCAGU | 1474 | | BACE:1510L21 antisense siNA | uGGuuGGuAAccucAcccATsT | 1634 |
| | | | | (1492C) stab11 | | |
| 1753 | UCACCUUGGACAUGGAAGACUGU | 1475 | | BACE:1773L21 antisense siNA | AGucuuccAuGuccAAGGuTsT | 1635 |
| | | | | (1755C) stab11 | | |
| 1803 | UCAACCCUCAUGACCAUAGCCUA | 1476 | | BACE:1823L21 antisense siNA | GGcuAuGGucAuGAGGGuuTsT | 1636 |
| | | | | (1805C) stab11 | | |
| 2457 | CCUAACAUUGGUGCAAAGAUUGC | 1477 | 31387 | BACE:2477L21 antisense siNA | AAucuuuGcAccAAuGuuATsT | 1637 |
| | | | | (2459C) stab11 | | |
| 3583 | UAUGGGACCUGCUAAGUGUGGAA | 1478 | | BACE:3603L21 antisense siNA | ccAcAcuuAGcAGGucccATsT | 1638 |
| | | | | (3585C) stab11 | | |
| 1025 | CCUGGAGCCUUUCUUUGACUCUC | 1471 | | BACE:1027U21 sense siNA stab18 | B uGGAGccuuucuuuGAcucTT B | 1639 |
| 1028 | GGAGCCUUUCUUUGACUCUCUGG | 1472 | | BACE:1030U21 sense siNA stab18 | B AGccuuucuuuGAcucucuTT B | 1640 |
| 1393 | AGAAGUUCCCUGAUGGUUUCUGG | 1473 | | BACE:1395U21 sense siNA stab18 | B AAGuucccuGAuGGuuucuTT B | 1641 |
| 1490 | AAUGGGUGAGGUUACCAACCAGU | 1474 | | BACE:1492U21 sense siNA stab18 | B uGGGuGAGGuuAccAAccATT B | 1642 |
| 1753 | UCACCUUGGACAUGGAAGACUGU | 1475 | | BACE:1755U21 sense siNA stab18 | B AccuuGGAcAuGGAAGAcuTT B | 1643 |
| 1803 | UCAACCCUCAUGACCAUAGCCUA | 1476 | | BACE:1805U21 sense siNA stab18 | B AAcccucAuGAccAuAGccTT B | 1644 |
| 2457 | CCUAACAUUGGUGCAAAGAUUGC | 1477 | | BACE:2459U21 sense siNA stab18 | B uAAcAuuGGuGcAAAGAuuTT B | 1645 |
| 3583 | UAUGGGACCUGCUAAGUGUGGAA | 1478 | | BACE:3585U21 sense siNA stab18 | B uGGGAccuGcuAAGuGuGGTT B | 1646 |
| 1025 | CCUGGAGCCUUUCUUUGACUCUC | 1471 | | BACE:1045L21 antisense siNA | GAGucAAAGAAAGGcuccATsT | 1647 |
| | | | | (1027C) stab08 | | |
| 1028 | GGAGCCUUUCUUUGACUCUCUGG | 1472 | | BACE:1048L21 antisense siNA | AGAGAGucAAAGAAAGGcuTsT | 1648 |
| | | | | (1030C) stab08 | | |
| 1393 | AGAAGUUCCCUGAUGGUUUCUGG | 1473 | | BACE:1413L21 antisense siNA | AGAAAccAucAGGGAAcuuTsT | 1649 |
| | | | | (1395C) stab08 | | |
| 1490 | AAUGGGUGAGGUUACCAACCAGU | 1474 | | BACE:1510L21 antisense siNA | uGGuuGGuAAccucAcccATsT | 1650 |
| | | | | (1492C) stab08 | | |
| 1753 | UCACCUUGGACAUGGAAGACUGU | 1475 | | BACE:1773L21 antisense siNA | AGucuuccAuGuccAAGGuTsT | 1651 |
| | | | | (1755C) stab08 | | |
| 1803 | UCAACCCUCAUGACCAUAGCCUA | 1476 | | BACE:1823L21 antisense siNA | GGcuAuGGucAuGAGGGuuTsT | 1652 |
| | | | | (1805C) stab08 | | |
| 2457 | CCUAACAUUGGUGCAAAGAUUGC | 1477 | | BACE:2477L21 antisense siNA | AAucuuuGcAccAAuGuuATsT | 1653 |
| | | | | (2459C) stab08 | | |
| 3583 | UAUGGGACCUGCUAAGUGUGGAA | 1478 | | BACE:3603L21 antisense siNA | ccAcAcuuAGcAGGucccATsT | 1654 |
| | | | | (3585C) stab08 | | |
| 1025 | CCUGGAGCCUUUCUUUGACUCUC | 1471 | | BACE:1027U21 sense siNA stab09 | B UGGAGCCUUUCUUUGACUCTT B | 1655 |
| 1028 | GGAGCCUUUCUUUGACUCUCUGG | 1472 | | BACE:1030U21 sense siNA stab09 | B AGCCUUUCUUUGACUCUCUTT B | 1656 |
| 1393 | AGAAGUUCCCUGAUGGUUUCUGG | 1473 | | BACE:1395U21 sense siNA stab09 | B AAGUUCCCUGAUGGUUUCUTT B | 1657 |
| 1490 | AAUGGGUGAGGUUACCAACCAGU | 1474 | | BACE:1492U21 sense siNA stab09 | B UGGGUGAGGUUACCAACCATT B | 1658 |
| 1753 | UCACCUUGGACAUGGAAGACUGU | 1475 | | BACE:1755U21 sense siNA stab09 | B ACCUUGGACAUGGAAGACUTT B | 1659 |
| 1803 | UCAACCCUCAUGACCAUAGCCUA | 1476 | | BACE:1805U21 sense siNA stab09 | B AACCCUCAUGACCAUAGCCTT B | 1660 |
| 2457 | CCUAACAUUGGUGCAAAGAUUGC | 1477 | | BACE:2459U21 sense siNA stab09 | B UAACAUUGGUGCAAAGAUUTT B | 1661 |
| 3583 | UAUGGGACCUGCUAAGUGUGGAA | 1478 | | BACE:3585U21 sense siNA stab09 | B UGGGACCUGCUAAGUGUGGTT B | 1662 |
| 1025 | CCUGGAGCCUUUCUUUGACUCUC | 1471 | | BACE:1045L21 antisense siNA | GAGUCAAAGAAAGGCUCCATsT | 1663 |
| | | | | (1027C) stab10 | | |
| 1028 | GGAGCCUUUCUUUGACUCUCUGG | 1472 | | BACE:1048L21 antisense siNA | AGAGAGUCAAAGAAAGGCUTsT | 1664 |
| | | | | (1030C) stab10 | | |
| 1393 | AGAAGUUCCCUGAUGGUUUCUGG | 1473 | | BACE:1413L21 antisense siNA | AGAAACCAUCAGGGAACUUTsT | 1665 |
| | | | | (1395C) stab10 | | |
| 1490 | AAUGGGUGAGGUUACCAACCAGU | 1474 | | BACE:1510L21 antisense siNA | UGGUUGGUAACCUCACCCATsT | 1666 |
| | | | | (1492C) stab10 | | |
| 1753 | UCACCUUGGACAUGGAAGACUGU | 1475 | | BACE:1773L21 antisense siNA | AGUCUUCCAUGUCCAAGGUTsT | 1667 |
| | | | | (1755C) stab10 | | |
| 1803 | UCAACCCUCAUGACCAUAGCCUA | 1476 | | BACE:1823L21 antisense siNA | GGCUAUGGUCAUGAGGGUUTsT | 1668 |
| | | | | (1805C) stab10 | | |
| 2457 | CCUAACAUUGGUGCAAAGAUUGC | 1477 | | BACE:2477L21 antisense siNA | AAUCUUUGCACCAAUGUUATsT | 1669 |
| | | | | (2459C) stab10 | | |
| 3583 | UAUGGGACCUGCUAAGUGUGGAA | 1478 | | BACE:3603L21 antisense siNA | CCACACUUAGCAGGUCCCATsT | 1670 |
| | | | | (3585C) stab10 | | |
| 1025 | CCUGGAGCCUUUCUUUGACUCUC | 1471 | | BACE:1045L21 antisense siNA | GAGucAAAGAAAGGcuccATT B | 1671 |
| | | | | (1027C) stab19 | | |
| 1028 | GGAGCCUUUCUUUGACUCUCUGG | 1472 | | BACE:1048L21 antisense siNA | AGAGAGucAAAGAAAGGcuTT B | 1672 |
| | | | | (1030C) stab19 | | |
| 1393 | AGAAGUUCCCUGAUGGUUUCUGG | 1473 | | BACE:1413L21 antisense siNA | AGAAAccAucAGGGAAcuuTT B | 1673 |
| | | | | (1395C) stab19 | | |
| 1490 | AAUGGGUGAGGUUACCAACCAGU | 1474 | | BACE:1510L21 antisense siNA | uGGuuGGuAAccucAcccATT B | 1674 |
| | | | | (1492C) stab19 | | |
| 1753 | UCACCUUGGACAUGGAAGACUGU | 1475 | | BACE:1773L21 antisense siNA | AGucuuccAuGuccAAGGuTT B | 1675 |
| | | | | (1755C) stab19 | | |
| 1803 | UCAACCCUCAUGACCAUAGCCUA | 1476 | | BACE:1823L21 antisense siNA | GGcuAuGGucAuGAGGGuuTT B | 1676 |
| | | | | (1805C) stab19 | | |
| 2457 | CCUAACAUUGGUGCAAAGAUUGC | 1477 | | BACE:2477L21 antisense siNA | AAucuuuGcAccAAuGuuATT B | 1677 |
| | | | | (2459C) stab19 | | |
| 3583 | UAUGGGACCUGCUAAGUGUGGAA | 1478 | | BACE:3603L21 antisense siNA | ccAcAcuuAGcAGGucccATT B | 1678 |
| | | | | (3585C) stab19 | | |
| 1025 | CCUGGAGCCUUUCUUUGACUCUC | 1471 | | BACE:1045L21 antisense siNA | GAGUCAAAGAAAGGCUCCATT B | 1679 |
| | | | | (1027C) stab22 | | |
| 1028 | GGAGCCUUUCUUUGACUCUCUGG | 1472 | | BACE:1048L21 antisense siNA | AGAGAGUCAAAGAAAGGCUTT B | 1680 |
| | | | | (1030C) stab22 | | |
| 1393 | AGAAGUUCCCUGAUGGUUUCUGG | 1473 | | BACE:1413L21 antisense siNA | AGAAACCAUCAGGGAACUUTT B | 1681 |
| | | | | (1395C) stab22 | | |
| 1490 | AAUGGGUGAGGUUACCAACCAGU | 1474 | | BACE:1510L21 antisense siNA | UGGUUGGUAACCUCACCCATT B | 1682 |
| | | | | (1492C) stab22 | | |
| 1753 | UCACCUUGGACAUGGAAGACUGU | 1475 | | BACE:1773L21 antisense siNA | AGUCUUCCAUGUCCAAGGUTT B | 1683 |
| | | | | (1755C) stab22 | | |
| 1803 | UCAACCCUCAUGACCAUAGCCUA | 1476 | | BACE:1823L21 antisense siNA | GGCUAUGGUCAUGAGGGUUTT B | 1684 |
| | | | | (1805C) stab22 | | |
| 2457 | CCUAACAUUGGUGCAAAGAUUGC | 1477 | | BACE:2477L21 antisense siNA | AAUCUUUGCACCAAUGUUATT B | 1685 |
| | | | | (2459C) stab22 | | |
| 3583 | UAUGGGACCUGCUAAGUGUGGAA | 1478 | | BACE:3603L21 antisense siNA | CCACACUUAGCAGGUCCCATT B | 1686 |
| | | | | (3585C) stab22 | | |
| 2457 | CCUAACAUUGGUGCAAAGAUUGC | 657 | 31390 | BACE:2459U21 sense siNA inv | B uuAGAAAcGuGGuuAcAAuTT B | 1687 |
| | | | | stab04 | | |
| 2457 | CCUAACAUUGGUGCAAAGAUUGC | 657 | 31393 | BACE:2477L21 antisense siNA | AuuGuAAccAcGuuucuAATsT | 1688 |
| | | | | (2459C) inv stab05 | | |
| 2457 | CCUAACAUUGGUGCAAAGAUUGC | 657 | 31396 | BACE:2459U21 sense siNA inv | B uuAGAAAcGuGGuuAcAAuTT B | 1689 |
| | | | | stab07 | | |
| 2457 | CCUAACAUUGGUGCAAAGAUUGC | 657 | 31399 | BACE:2477L21 antisense siNA | AuuGuAAccAcGuuucuAATsT | 1690 |
| | | | | (2459C) inv stab11 | | |

PSEN1

| | | | | | | |
|---|---|---|---|---|---|---|
| 693 | CUAAUGGACGACCCCAGGGUAAC | 1479 | | PSEN1:695U21 sense siNA | AAUGGACGACCCCAGGGUATT | 1691 |
| 1131 | CUGUUGCACUCCUGAUCUGGAAU | 1480 | | PSEN1:1133U21 sense siNA | GUUGCACUCCUGAUCUGGATT | 1692 |
| 1493 | GAAAGCACAGAAAGGGAGUCACA | 1481 | | PSEN1:1495U21 sense siNA | AAGCACAGAAAGGGAGUCATT | 1693 |
| 1505 | AGGGAGUCACAAGACACUGUUGC | 1482 | | PSEN1:1507U21 sense siNA | GGAGUCACAAGACACUGUUTT | 1694 |
| 1748 | GACUGGAACACAACCAUAGCCUG | 1483 | | PSEN1:1750U21 sense siNA | CUGGAACACAACCAUAGCCTT | 1695 |
| 1751 | UGGAACACAACCAUAGCCUGUUU | 1484 | | PSEN1:1753U21 sense siNA | GAACACAACCAUAGCCUGUTT | 1696 |
| 2184 | CUACCAGAUUUGAGGGACGAGGU | 1485 | | PSEN1:2186U21 sense siNA | ACCAGAUUUGAGGGACGAGTT | 1697 |
| 3007 | UGUAUGCCCAAAGCGGUAGAAUU | 1486 | | PSEN1:3009U21 sense siNA | UAUGCCCAAAGCGGUAGAATT | 1698 |
| 693 | CUAAUGGACGACCCCAGGGUAAC | 1479 | | PSEN1:713L21 antisense siNA | UACCCUGGGGUCGUCCAUUTT | 1699 |
| | | | | (695C) | | |
| 1131 | CUGUUGCACUCCUGAUCUGGAAU | 1480 | | PSEN1:1151L21 antisense siNA | UCCAGAUCAGGAGUGCAACTT | 1700 |
| | | | | (1133C) | | |
| 1493 | GAAAGCACAGAAAGGGAGUCACA | 1481 | | PSEN1:1513L21 antisense siNA | UGACUCCCUUUCUGUGCUUTT | 1701 |
| | | | | (1495C) | | |
| 1505 | AGGGAGUCACAAGACACUGUUGC | 1482 | | PSEN1:1525L21 antisense siNA | AACAGUGUCUUGUGACUCCTT | 1702 |
| | | | | (1507C) | | |
| 1748 | GACUGGAACACAACCAUAGCCUG | 1483 | | PSEN1:1768L21 antisense siNA | GGCUAUGGUUGUGUUCCAGTT | 1703 |
| | | | | (1750C) | | |
| 1751 | UGGAACACAACCAUAGCCUGUUU | 1484 | | PSEN1:1771L21 antisense siNA | ACAGGCUAUGGUUGUGUUCTT | 1704 |
| | | | | (1753C) | | |
| 2184 | CUACCAGAUUUGAGGGACGAGGU | 1485 | | PSEN1:2204L21 antisense siNA | CUCGUCCCUCAAAUCUGGUTT | 1705 |
| | | | | (2186C) | | |
| 3007 | UGUAUGCCCAAAGCGGUAGAAUU | 1486 | | PSEN1:3027L21 antisense siNA | UUCUACCGCUUUGGGCAUATT | 1706 |
| | | | | (3009C) | | |
| 693 | CUAAUGGACGACCCCAGGGUAAC | 1479 | | PSEN1:695U21 sense siNA stab04 | B AAuGGAcGAccccAGGGuATT B | 1707 |
| 1131 | CUGUUGCACUCCUGAUCUGGAAU | 1480 | | PSEN1:1133U21 sense siNA stab04 | B GuuGcAcuccuGAucuGGATT B | 1708 |
| 1493 | GAAAGCACAGAAAGGGAGUCACA | 1481 | | PSEN1:1495U21 sense siNA stab04 | B AAGcAcAGAAAGGGAGucATT B | 1709 |
| 1505 | AGGGAGUCACAAGACACUGUUGC | 1482 | | PSEN1:1507U21 sense siNA stab04 | B GGAGucAcAAGAcAcuGuuTT B | 1710 |
| 1748 | GACUGGAACACAACCAUAGCCUG | 1483 | | PSEN1:1750U21 sense siNA stab04 | B cuGGAAcAcAAccAuAGccTT B | 1711 |
| 1751 | UGGAACACAACCAUAGCCUGUUU | 1484 | | PSEN1:1753U21 sense siNA stab04 | B GAAcAcAAccAuAGccuGuTT B | 1712 |
| 2184 | CUACCAGAUUUGAGGGACGAGGU | 1485 | | PSEN1:2186U21 sense siNA stab04 | B AccAGAuuuGAGGGAcGAGTT B | 1713 |
| 3007 | UGUAUGCCCAAAGCGGUAGAAUU | 1486 | | PSEN1:3009U21 sense siNA stab04 | B uAuGcccAAAGcGGuAGAATT B | 1714 |
| 693 | CUAAUGGACGACCCCAGGGUAAC | 1479 | | PSEN1:713L21 antisense siNA | uAcccuGGGGucGuccAuuTsT | 1715 |
| | | | | (695C) stab05 | | |
| 1131 | CUGUUGCACUCCUGAUCUGGAAU | 1480 | | PSEN1:1151L21 antisense siNA | uccAGAucAGGAGuGcAAcTsT | 1716 |
| | | | | (1133C) stab05 | | |
| 1493 | GAAAGCACAGAAAGGGAGUCACA | 1481 | | PSEN1:1513L21 antisense siNA | uGAcucccuuucuGuGcuuTsT | 1717 |
| | | | | (1495C) stab05 | | |
| 1505 | AGGGAGUCACAAGACACUGUUGC | 1482 | | PSEN1:1525L21 antisense siNA | AAcAGuGucuuGuGAcuccTsT | 1718 |
| | | | | (1507C) stab05 | | |
| 1748 | GACUGGAACACAACCAUAGCCUG | 1483 | | PSEN1:1768L21 antisense siNA | GGcuAuGGuuGuGuuccAGTsT | 1719 |
| | | | | (1750C) stab05 | | |
| 1751 | UGGAACACAACCAUAGCCUGUUU | 1484 | | PSEN1:1771L21 antisense siNA | AcAGGcuAuGGuuGuGuucTsT | 1720 |
| | | | | (1753C) stab05 | | |
| 2184 | CUACCAGAUUUGAGGGACGAGGU | 1485 | | PSEN1:2204L21 antisense siNA | cucGucccucAAAucuGGuTsT | 1721 |
| | | | | (2186C) stab05 | | |
| 3007 | UGUAUGCCCAAAGCGGUAGAAUU | 1486 | | PSEN1:3027L21 antisense siNA | uucuAccGcuuuGGGcAuATsT | 1722 |
| | | | | (3009C) stab05 | | |
| 693 | CUAAUGGACGACCCCAGGGUAAC | 1479 | | PSEN1:695U21 sense siNA stab07 | B AAuGGAcGAccccAGGGuATT B | 1723 |
| 1131 | CUGUUGCACUCCUGAUCUGGAAU | 1480 | | PSEN1:1133U21 sense siNA stab07 | B GuuGcAcuccuGAucuGGATT B | 1724 |
| 1493 | GAAAGCACAGAAAGGGAGUCACA | 1481 | | PSEN1:1495U21 sense siNA stab07 | B AAGcAcAGAAAGGGAGucATT B | 1725 |
| 1505 | AGGGAGUCACAAGACACUGUUGC | 1482 | | PSEN1:1507U21 sense siNA stab07 | B GGAGucAcAAGAcAcuGuuTT B | 1726 |
| 1748 | GACUGGAACACAACCAUAGCCUG | 1483 | | PSEN1:1750U21 sense siNA stab07 | B cuGGAAcAcAAccAuAGccTT B | 1727 |
| 1751 | UGGAACACAACCAUAGCCUGUUU | 1484 | | PSEN1:1753U21 sense siNA stab07 | B GAAcAcAAccAuAGccuGuTT B | 1728 |
| 2184 | CUACCAGAUUUGAGGGACGAGGU | 1485 | | PSEN1:2186U21 sense siNA stab07 | B AccAGAuuuGAGGGAcGAGTT B | 1729 |
| 3007 | UGUAUGCCCAAAGCGGUAGAAUU | 1486 | | PSEN1:3009U21 sense siNA stab07 | B uAuGcccAAAGcGGuAGAATT B | 1730 |
| 693 | CUAAUGGACGACCCCAGGGUAAC | 1479 | | PSEN1:713L21 antisense siNA | uAcccuGGGGucGuccAuuTsT | 1731 |
| | | | | (695C) stab11 | | |
| 1131 | CUGUUGCACUCCUGAUCUGGAAU | 1480 | | PSEN1:1151L21 antisense siNA | uccAGAucAGGAGuGcAAcTsT | 1732 |
| | | | | (1133C) stab11 | | |
| 1493 | GAAAGCACAGAAAGGGAGUCACA | 1481 | | PSEN1:1513L21 antisense siNA | uGAcucccuuucuGuGcuuTsT | 1733 |
| | | | | (1495C) stab11 | | |
| 1505 | AGGGAGUCACAAGACACUGUUGC | 1482 | | PSEN1:1525L21 antisense siNA | AAcAGuGucuuGuGAcuccTsT | 1734 |
| | | | | (1507C) stab11 | | |
| 1748 | GACUGGAACACAACCAUAGCCUG | 1483 | | PSEN1:1768L21 antisense siNA | GGcuAuGGuuGuGuuccAGTsT | 1735 |
| | | | | (1750C) stab11 | | |
| 1751 | UGGAACACAACCAUAGCCUGUUU | 1484 | | PSEN1:1771L21 antisense siNA | AcAGGcuAuGGuuGuGuucTsT | 1736 |
| | | | | (1753C) stab11 | | |
| 2184 | CUACCAGAUUUGAGGGACGAGGU | 1485 | | PSEN1:2204L21 antisense siNA | cucGucccucAAAucuGGuTsT | 1737 |
| | | | | (2186C) stab11 | | |
| 3007 | UGUAUGCCCAAAGCGGUAGAAUU | 1486 | | PSEN1:3027L21 antisense siNA | uucuAccGcuuuGGGcAuATsT | 1738 |
| | | | | (3009C) stab11 | | |
| 693 | CUAAUGGACGACCCCAGGGUAAC | 1479 | | PSEN1:695U21 sense siNA stab18 | B AAuGGAcGAccccAGGGuATT B | 1739 |
| 1131 | CUGUUGCACUCCUGAUCUGGAAU | 1480 | | PSEN1:1133U21 sense siNA stab18 | B GuuGcAcuccuGAucuGGATT B | 1740 |
| 1493 | GAAAGCACAGAAAGGGAGUCACA | 1481 | | PSEN1:1495U21 sense siNA stab18 | B AAGcAcAGAAAGGGAGucATT B | 1741 |
| 1505 | AGGGAGUCACAAGACACUGUUGC | 1482 | | PSEN1:1507U21 sense siNA stab18 | B GGAGucAcAAGAcAcuGuuTT B | 1742 |
| 1748 | GACUGGAACACAACCAUAGCCUG | 1483 | | PSEN1:1750U21 sense siNA stab18 | B cuGGAAcAcAAccAuAGccTT B | 1743 |
| 1751 | UGGAACACAACCAUAGCCUGUUU | 1484 | | PSEN1:1753U21 sense siNA stab18 | B GAAcAcAAccAuAGccuGuTT B | 1744 |
| 2184 | CUACCAGAUUUGAGGGACGAGGU | 1485 | | PSEN1:2186U21 sense siNA stab18 | B AccAGAuuuGAGGGAcGAGTT B | 1745 |
| 3007 | UGUAUGCCCAAAGCGGUAGAAUU | 1486 | | PSEN1:3009U21 sense siNA stab18 | B uAuGcccAAAGcGGuAGAATT B | 1746 |
| 693 | CUAAUGGACGACCCCAGGGUAAC | 1479 | 33933 | PSEN1:713L21 antisense siNA | uAcccuGGGGucGuccAuuTsT | 1747 |
| | | | | (695C) stab08 | | |
| 1131 | CUGUUGCACUCCUGAUCUGGAAU | 1480 | 33934 | PSEN1:1151L21 antisense siNA | uccAGAucAGGAGuGcAAcTsT | 1748 |
| | | | | (1133C) stab08 | | |
| 1493 | GAAAGCACAGAAAGGGAGUCACA | 1481 | 33935 | PSEN1:1513L21 antisense siNA | uGAcucccuuucuGuGcuuTsT | 1749 |
| | | | | (1495C) stab08 | | |
| 1505 | AGGGAGUCACAAGACACUGUUGC | 1482 | 33936 | PSEN1:1525L21 antisense siNA | AAcAGuGucuuGuGAcuccTsT | 1750 |
| | | | | (1507C) stab08 | | |
| 1748 | GACUGGAACACAACCAUAGCCUG | 1483 | 33937 | PSEN1:1768L21 antisense siNA | GGcuAuGGuuGuGuuccAGTsT | 1751 |
| | | | | (1750C) stab08 | | |
| 1751 | UGGAACACAACCAUAGCCUGUUU | 1484 | 33938 | PSEN1:1771L21 antisense siNA | AcAGGcuAuGGuuGuGuucTsT | 1752 |
| | | | | (1753C) stab08 | | |
| 2184 | CUACCAGAUUUGAGGGACGAGGU | 1485 | 33939 | PSEN1:2204L21 antisense siNA | cucGucccucAAAucuGGuTsT | 1753 |
| | | | | (2186C) stab08 | | |
| 3007 | UGUAUGCCCAAAGCGGUAGAAUU | 1486 | 33940 | PSEN1:3027L21 antisense siNA | uucuAccGcuuuGGGcAuATsT | 1754 |
| | | | | (3009C) stab08 | | |
| 693 | CUAAUGGACGACCCCAGGGUAAC | 1479 | 33917 | PSEN1:695U21 sense siNA stab09 | B AAUGGACGACCCCAGGGUATT B | 1755 |
| 1131 | CUGUUGCACUCCUGAUCUGGAAU | 1480 | 33918 | PSEN1:1133U21 sense siNA stab09 | B GUUGCACUCCUGAUCUGGATT B | 1756 |
| 1493 | GAAAGCACAGAAAGGGAGUCACA | 1481 | 33919 | PSEN1:1495U21 sense siNA stab09 | B AAGCACAGAAAGGGAGUCATT B | 1757 |
| 1505 | AGGGAGUCACAAGACACUGUUGC | 1482 | 33920 | PSEN1:1507U21 sense siNA stab09 | B GGAGUCACAAGACACUGUUTT B | 1758 |
| 1748 | GACUGGAACACAACCAUAGCCUG | 1483 | 33921 | PSEN1:1750U21 sense siNA stab09 | B CUGGAACACAACCAUAGCCTT B | 1759 |
| 1751 | UGGAACACAACCAUAGCCUGUUU | 1484 | 33922 | PSEN1:1753U21 sense siNA stab09 | B GAACACAACCAUAGCCUGUTT B | 1760 |
| 2184 | CUACCAGAUUUGAGGGACGAGGU | 1485 | 33923 | PSEN1:2186U21 sense siNA stab09 | B ACCAGAUUUGAGGGACGAGTT B | 1761 |
| 3007 | UGUAUGCCCAAAGCGGUAGAAUU | 1486 | 33924 | PSEN1:3009U21 sense siNA stab09 | B UAUGCCCAAAGCGGUAGAATT B | 1762 |
| 693 | CUAAUGGACGACCCCAGGGUAAC | 1479 | 33925 | PSEN1:713L21 antisense siNA | UACCCUGGGGUCGUCCAUUTsT | 1763 |
| | | | | (695C) stab10 | | |
| 1131 | CUGUUGCACUCCUGAUCUGGAAU | 1480 | 33926 | PSEN1:1151L21 antisense siNA | UCCAGAUCAGGAGUGCAACTsT | 1764 |
| | | | | (1133C) stab10 | | |
| 1493 | GAAAGCACAGAAAGGGAGUCACA | 1481 | 33927 | PSEN1:1513L21 antisense siNA | UGACUCCCUUUCUGUGCUUTsT | 1765 |
| | | | | (1495C) stab10 | | |
| 1505 | AGGGAGUCACAAGACACUGUUGC | 1482 | 33928 | PSEN1:1525L21 antisense siNA | AACAGUGUCUUGUGACUCCTsT | 1766 |
| | | | | (1507C) stab10 | | |
| 1748 | GACUGGAACACAACCAUAGCCUG | 1483 | 33929 | PSEN1:1768L21 antisense siNA | GGCUAUGGUUGUGUUCCAGTsT | 1767 |
| | | | | (1750C) stab10 | | |
| 1751 | UGGAACACAACCAUAGCCUGUUU | 1484 | 33930 | PSEN1:1771L21 antisense siNA | ACAGGCUAUGGUUGUGUUCTsT | 1768 |
| | | | | (1753C) stab10 | | |
| 2184 | CUACCAGAUUUGAGGGACGAGGU | 1485 | 33931 | PSEN1:2204L21 antisense siNA | CUCGUCCCUCAAAUCUGGUTsT | 1769 |
| | | | | (2186C) stab10 | | |
| 3007 | UGUAUGCCCAAAGCGGUAGAAUU | 1486 | 33932 | PSEN1:3027L21 antisense siNA | UUCUACCGCUUUGGGCAUATsT | 1770 |
| | | | | (3009C) stab10 | | |
| 693 | CUAAUGGACGACCCCAGGGUAAC | 1479 | | PSEN1:713L21 antisense siNA | uAcccuGGGGucGuccAuuTT B | 1771 |
| | | | | (695C) stab19 | | |
| 1131 | CUGUUGCACUCCUGAUCUGGAAU | 1480 | | PSEN1:1151L21 antisense siNA | uccAGAucAGGAGuGcAAcTT B | 1772 |
| | | | | (1133C) stab19 | | |
| 1493 | GAAAGCACAGAAAGGGAGUCACA | 1481 | | PSEN1:1513L21 antisense siNA | uGAcucccuuucuGuGcuuTT B | 1773 |
| | | | | (1495C) stab19 | | |
| 1505 | AGGGAGUCACAAGACACUGUUGC | 1482 | | PSEN1:1525L21 antisense siNA | AAcAGuGucuuGuGAcuccTT B | 1774 |
| | | | | (1507C) stab19 | | |
| 1748 | GACUGGAACACAACCAUAGCCUG | 1483 | | PSEN1:1768L21 antisense siNA | GGcuAuGGuuGuGuuccAGTT B | 1775 |
| | | | | (1750C) stab19 | | |
| 1751 | UGGAACACAACCAUAGCCUGUUU | 1484 | | PSEN1:1771L21 antisense siNA | AcAGGcuAuGGuuGuGuucTT B | 1776 |
| | | | | (1753C) stab19 | | |
| 2184 | CUACCAGAUUUGAGGGACGAGGU | 1485 | | PSEN1:2204L21 antisense siNA | cucGucccucAAAucuGGuTT B | 1777 |
| | | | | (2186C) stab19 | | |
| 3007 | UGUAUGCCCAAAGCGGUAGAAUU | 1486 | | PSEN1:3027L21 antisense siNA | uucuAccGcuuuGGGcAuATT B | 1778 |
| | | | | (3009C) stab19 | | |
| 693 | CUAAUGGACGACCCCAGGGUAAC | 1479 | | PSEN1:713L21 antisense siNA | UACCCUGGGGUCGUCCAUUTT B | 1779 |
| | | | | (695C) stab22 | | |
| 1131 | CUGUUGCACUCCUGAUCUGGAAU | 1480 | | PSEN1:1151L21 antisense siNA | UCCAGAUCAGGAGUGCAACTT B | 1780 |
| | | | | (1133C) stab22 | | |
| 1493 | GAAAGCACAGAAAGGGAGUCACA | 1481 | | PSEN1:1513L21 antisense siNA | UGACUCCCUUUCUGUGCUUTT B | 1781 |
| | | | | (1495C) stab22 | | |
| 1505 | AGGGAGUCACAAGACACUGUUGC | 1482 | | PSEN1:1525L21 antisense siNA | AACAGUGUCUUGUGACUCCTT B | 1782 |
| | | | | (1507C) stab22 | | |
| 1748 | GACUGGAACACAACCAUAGCCUG | 1483 | | PSEN1:1768L21 antisense siNA | GGCUAUGGUUGUGUUCCAGTT B | 1783 |
| | | | | (1750C) stab22 | | |
| 1751 | UGGAACACAACCAUAGCCUGUUU | 1484 | | PSEN1:1771L21 antisense siNA | ACAGGCUAUGGUUGUGUUCTT B | 1784 |
| | | | | (1753C) stab22 | | |
| 2184 | CUACCAGAUUUGAGGGACGAGGU | 1485 | | PSEN1:2204L21 antisense siNA | CUCGUCCCUCAAAUCUGGUTT B | 1785 |
| | | | | (2186C) stab22 | | |
| 3007 | UGUAUGCCCAAAGCGGUAGAAUU | 1486 | | PSEN1:3027L21 antisense siNA | UUCUACCGCUUUGGGCAUATT B | 1786 |
| | | | | (3009C) stab22 | | |

PSEN2

| | | | | | | |
|---|---|---|---|---|---|---|
| 104 | UUACUGAUGAAGAAACUGAGGCC | 1487 | | PSEN2:106U21 sense siNA | ACUGAUGAAGAAACUGAGGTT | 1787 |
| 260 | AGCCAGGGAGCAUCAUUCAUUUA | 1488 | | PSEN2:262U21 sense siNA | CCAGGGAGCAUCAUUCAUUTT | 1788 |
| 549 | ACCGCUAUGUCUGUAGUGGGGUU | 1489 | | PSEN2:551U21 sense siNA | CGCUAUGUCUGUAGUGGGGTT | 1789 |
| 597 | AAGAGCUGACCCUCAAAUACGGA | 1490 | | PSEN2:599U21 sense siNA | GAGCUGACCCUCAAAUACGTT | 1790 |
| 730 | CACGACAUUCACUGAGGACACAC | 1491 | | PSEN2:732U21 sense siNA | CGACAUUCACUGAGGACACTT | 1791 |
| 938 | GUGCUCAAGACCUACAAUGUGGC | 1492 | | PSEN2:940U21 sense siNA | GCUCAAGACCUACAAUGUGTT | 1792 |
| 947 | ACCUACAAUGUGGCCAUGGACUA | 1493 | | PSEN2:949U21 sense siNA | CUACAAUGUGGCCAUGGACTT | 1793 |
| 2095 | GAGUGUUCCCAAUGCUUUGUCCA | 1494 | | PSEN2:2097U21 sense siNA | GUGUUCCCAAUGCUUUGUCTT | 1794 |
| 104 | UUACUGAUGAAGAAACUGAGGCC | 1487 | | PSEN2:124L21 antisense siNA | CCUCAGUUUCUUCAUCAGUTT | 1795 |
| | | | | (106C) | | |
| 260 | AGCCAGGGAGCAUCAUUCAUUUA | 1488 | | PSEN2:280L21 antisense siNA | AAUGAAUGAUGCUCCCUGGTT | 1796 |
| | | | | (262C) | | |
| 549 | ACCGCUAUGUCUGUAGUGGGGUU | 1489 | | PSEN2:569L21 antisense siNA | CCCCACUACAGACAUAGCGTT | 1797 |
| | | | | (551C) | | |
| 597 | AAGAGCUGACCCUCAAAUACGGA | 1490 | | PSEN2:617L21 antisense siNA | CGUAUUUGAGGGUCAGCUCTT | 1798 |
| | | | | (599C) | | |
| 730 | CACGACAUUCACUGAGGACACAC | 1491 | | PSEN2:750L21 antisense siNA | GUGUCCUCAGUGAAUGUCGTT | 1799 |
| | | | | (732C) | | |
| 938 | GUGCUCAAGACCUACAAUGUGGC | 1492 | | PSEN2:958L21 antisense siNA | CACAUUGUAGGUCUUGAGCTT | 1800 |
| | | | | (940C) | | |
| 947 | ACCUACAAUGUGGCCAUGGACUA | 1493 | | PSEN2:967L21 antisense siNA | GUCCAUGGCCACAUUGUAGTT | 1801 |
| | | | | (949C) | | |
| 2095 | GAGUGUUCCCAAUGCUUUGUCCA | 1494 | | PSEN2:2115L21 antisense siNA | GACAAAGCAUUGGGAACACTT | 1802 |
| | | | | (2097C) | | |
| 104 | UUACUGAUGAAGAAACUGAGGCC | 1487 | | PSEN2:106U21 sense siNA stab04 | B AcuGAuGAAGAAAcuGAGGTT B | 1803 |
| 260 | AGCCAGGGAGCAUCAUUCAUUUA | 1488 | | PSEN2.262U21 sense siNA stab04 | B ccAGGGAGcAucAuucAuuTT B | 1804 |
| 549 | ACCGCUAUGUCUGUAGUGGGGUU | 1489 | | PSEN2:551U21 sense siNA stab04 | B cGcuAuGucuGuAGuGGGGTT B | 1805 |
| 597 | AAGAGCUGACCCUCAAAUACGGA | 1490 | | PSEN2:599U21 sense siNA stab04 | B GAGcuGAcccucAAAuAcGTT B | 1806 |
| 730 | CACGACAUUCACUGAGGACACAC | 1491 | | PSEN2:732U21 sense siNA stab04 | B cGAcAuucAcuGAGGAcAcTT B | 1807 |
| 938 | GUGCUCAAGACCUACAAUGUGGC | 1492 | | PSEN2:940U21 sense siNA stab04 | B GcucAAGAccuAcAAuGuGTT B | 1808 |
| 947 | ACCUACAAUGUGGCCAUGGACUA | 1493 | | PSEN2:949U21 sense siNA stab04 | B cuAcAAuGuGGccAuGGAcTT B | 1809 |
| 2095 | GAGUGUUCCCAAUGCUUUGUCCA | 1494 | | PSEN2:2097U21 sense siNA stab04 | B GuGuucccAAuGcuuuGucTT B | 1810 |
| 104 | UUACUGAUGAAGAAACUGAGGCC | 1487 | | PSEN2:124L21 antisense siNA | ccucAGuuucuucAucAGuTsT | 1811 |
| | | | | (106C) stab05 | | |
| 260 | AGCCAGGGAGCAUCAUUCAUUUA | 1488 | | PSEN2:280L21 antisense siNA | AAuGAAuGAuGcucccuGGTsT | 1812 |
| | | | | (262C) stab05 | | |
| 549 | ACCGCUAUGUCUGUAGUGGGGUU | 1489 | | PSEN2:569L21 antisense siNA | ccccAcuAcAGAcAuAGcGTsT | 1813 |
| | | | | (551C) stab05 | | |
| 597 | AAGAGCUGACCCUCAAAUACGGA | 1490 | | PSEN2:617L21 antisense siNA | cGuAuuuGAGGGucAGcucTsT | 1814 |
| | | | | (599C) stab05 | | |
| 730 | CACGACAUUCACUGAGGACACAC | 1491 | | PSEN2:750L21 antisense siNA | GuGuccucAGuGAAuGucGTsT | 1815 |
| | | | | (732C) stab05 | | |
| 938 | GUGCUCAAGACCUACAAUGUGGC | 1492 | | PSEN2:958L21 antisense siNA | cAcAuuGuAGGucuuGAGcTsT | 1816 |
| | | | | (940C) stab05 | | |
| 947 | ACCUACAAUGUGGCCAUGGACUA | 1493 | | PSEN2:967L21 antisense siNA | GuccAuGGccAcAuuGuAGTsT | 1817 |
| | | | | (949C) stab05 | | |
| 2095 | GAGUGUUCCCAAUGCUUUGUCCA | 1494 | | PSEN2:2115L21 antisense siNA | GAcAAAGcAuuGGGAAcAcTsT | 1818 |
| | | | | (2097C) stab05 | | |
| 104 | UUACUGAUGAAGAAACUGAGGCC | 1487 | | PSEN2:106U21 sense siNA stab07 | B AcuGAuGAAGAAAcuGAGGTT B | 1819 |
| 260 | AGCCAGGGAGCAUCAUUCAUUUA | 1488 | | PSEN2:262U21 sense siNA stab07 | B ccAGGGAGcAucAuucAuuTT B | 1820 |
| 549 | ACCGCUAUGUCUGUAGUGGGGUU | 1489 | | PSEN2:551U21 sense siNA stab07 | B cGcuAuGucuGuAGuGGGGTT B | 1821 |
| 597 | AAGAGCUGACCCUCAAAUACGGA | 1490 | | PSEN2:599U21 sense siNA stab07 | B GAGcuGAcccucAAAuAcGTT B | 1822 |
| 730 | CACGACAUUCACUGAGGACACAC | 1491 | | PSEN2:732U21 sense siNA stab07 | B cGAcAuucAcuGAGGAcAcTT B | 1823 |
| 938 | GUGCUCAAGACCUACAAUGUGGC | 1492 | | PSEN2:940U21 sense siNA stab07 | B GcucAAGAccuAcAAuGuGTT B | 1824 |
| 947 | ACCUACAAUGUGGCCAUGGACUA | 1493 | | PSEN2:949U21 sense siNA stab07 | B cuAcAAuGuGGccAuGGAcTT B | 1825 |
| 2095 | GAGUGUUCCCAAUGCUUUGUCCA | 1494 | | PSEN2:2097U21 sense siNA stab07 | B GuGuucccAAuGcuuuGucTT B | 1826 |
| 104 | UUACUGAUGAAGAAACUGAGGCC | 1487 | | PSEN2:124L21 antisense siNA | ccucAGuuucuucAucAGuTsT | 1827 |
| | | | | (106C) stab11 | | |
| 260 | AGCCAGGGAGCAUCAUUCAUUUA | 1488 | | PSEN2:280L21 antisense siNA | AAuGAAuGAuGcucccuGGTsT | 1828 |
| | | | | (262C) stab11 | | |
| 549 | ACCGCUAUGUCUGUAGUGGGGUU | 1489 | | PSEN2:569L21 antisense siNA | ccccAcuAcAGAcAuAGcGTsT | 1829 |
| | | | | (551C) stab11 | | |
| 597 | AAGAGCUGACCCUCAAAUACGGA | 1490 | | PSEN2:617L21 antisense siNA | cGuAuuuGAGGGucAGcucTsT | 1830 |
| | | | | (599C) stab11 | | |
| 730 | CACGACAUUCACUGAGGACACAC | 1491 | | PSEN2:750L21 antisense siNA | GuGuccucAGuGAAuGucGTsT | 1831 |
| | | | | (732C) stab11 | | |
| 938 | GUGCUCAAGACCUACAAUGUGGC | 1492 | | PSEN2:958L21 antisense siNA | cAcAuuGuAGGucuuGAGcTsT | 1832 |
| | | | | (940C) stab11 | | |
| 947 | ACCUACAAUGUGGCCAUGGACUA | 1493 | | PSEN2:967L21 antisense siNA | GuccAuGGccAcAuuGuAGTsT | 1833 |
| | | | | (949C) stab11 | | |
| 2095 | GAGUGUUCCCAAUGCUUUGUCCA | 1494 | | PSEN2:2115L21 antisense siNA | GAcAAAGcAuuGGGAAcAcTsT | 1834 |
| | | | | (2097C) stab11 | | |
| 104 | UUACUGAUGAAGAAACUGAGGCC | 1487 | | PSEN2:106U21 sense siNA stab18 | B AcuGAuGAAGAAAcuGAGGTT B | 1835 |
| 260 | AGCCAGGGAGCAUCAUUCAUUUA | 1488 | | PSEN2:262U21 sense siNA stab18 | B ccAGGGAGcAucAuucAuuTT B | 1836 |
| 549 | ACCGCUAUGUCUGUAGUGGGGUU | 1489 | | PSEN2:551U21 sense siNA stab18 | B cGcuAuGucuGuAGuGGGGTT B | 1837 |
| 597 | AAGAGCUGACCCUCAAAUACGGA | 1490 | | PSEN2:599U21 sense siNA stab18 | B GAGcuGAcccucAAAuAcGTT B | 1838 |
| 730 | CACGACAUUCACUGAGGACACAC | 1491 | | PSEN2:732U21 sense siNA stab18 | B cGAcAuucAcuGAGGAcAcTT B | 1839 |
| 938 | GUGCUCAAGACCUACAAUGUGGC | 1492 | | PSEN2:940U21 sense siNA stab18 | B GcucAAGAccuAcAAuGuGTT B | 1840 |
| 947 | ACCUACAAUGUGGCCAUGGACUA | 1493 | | PSEN2:949U21 sense siNA stab18 | B cuAcAAuGuGGccAuGGAcTT B | 1841 |
| 2095 | GAGUGUUCCCAAUGCUUUGUCCA | 1494 | | PSEN2:2097U21 sense siNA stab18 | B GuGuucccAAuGcuuuGucTT B | 1842 |
| 104 | UUACUGAUGAAGAAACUGAGGCC | 1487 | 33957 | PSEN2:124L21 antisense siNA | ccucAGuuucuucAucAGuTsT | 1843 |
| | | | | (106C) stab08 | | |
| 260 | AGCCAGGGAGCAUCAUUCAUUUA | 1488 | 33958 | PSEN2:280L21 antisense siNA | AAuGAAuGAuGcucccuGGTsT | 1844 |
| | | | | (262C) stab08 | | |
| 549 | ACCGCUAUGUCUGUAGUGGGGUU | 1489 | 33959 | PSEN2:569L21 antisense siNA | ccccAcuAcAGAcAuAGcGTsT | 1845 |
| | | | | (551C) stab08 | | |
| 597 | AAGAGCUGACCCUCAAAUACGGA | 1490 | 33960 | PSEN2:617L21 antisense siNA | cGuAuuuGAGGGucAGcucTsT | 1846 |
| | | | | (599C) stab08 | | |
| 730 | CACGACAUUCACUGAGGACACAC | 1491 | 33961 | PSEN2:750L21 antisense siNA | GuGuccucAGuGAAuGucGTsT | 1847 |
| | | | | (732C) stab08 | | |
| 938 | GUGCUCAAGACCUACAAUGUGGC | 1492 | 33962 | PSEN2:958L21 antisense siNA | cAcAuuGuAGGucuuGAGcTsT | 1848 |
| | | | | (940C) stab08 | | |
| 947 | ACCUACAAUGUGGCCAUGGACUA | 1493 | 33963 | PSEN2:967L21 antisense siNA | GuccAuGGccAcAuuGuAGTsT | 1849 |
| | | | | (949C) stab08 | | |
| 2095 | GAGUGUUCCCAAUGCUUUGUCCA | 1494 | 33964 | PSEN2:2115L21 antisense siNA | GAcAAAGcAuuGGGAAcAcTsT | 1850 |
| | | | | (2097C) stab08 | | |
| 104 | UUACUGAUGAAGAAACUGAGGCC | 1487 | 33941 | PSEN2:106U21 sense siNA stab09 | B ACUGAUGAAGAAACUGAGGTT B | 1851 |
| 260 | AGCCAGGGAGCAUCAUUCAUUUA | 1488 | 33942 | PSEN2:262U21 sense siNA stab09 | B CCAGGGAGCAUCAUUCAUUTT B | 1852 |
| 549 | ACCGCUAUGUCUGUAGUGGGGUU | 1489 | 33943 | PSEN2:551U21 sense siNA stab09 | B CGCUAUGUCUGUAGUGGGGTT B | 1853 |
| 597 | AAGAGCUGACCCUCAAAUACGGA | 1490 | 33944 | PSEN2:599U21 sense siNA stab09 | B GAGCUGACCCUCAAAUACGTT B | 1854 |
| 730 | CACGACAUUCACUGAGGACACAC | 1491 | 33945 | PSEN2:732U21 sense siNA stab09 | B CGACAUUCACUGAGGACACTT B | 1855 |
| 938 | GUGCUCAAGACCUACAAUGUGGC | 1492 | 33946 | PSEN2:940U21 sense siNA stab09 | B GCUCAAGACCUACAAUGUGTT B | 1856 |
| 947 | ACCUACAAUGUGGCCAUGGACUA | 1493 | 33947 | PSEN2:949U21 sense siNA stab09 | B CUACAAUGUGGCCAUGGACTT B | 1857 |
| 2095 | GAGUGUUCCCAAUGCUUUGUCCA | 1494 | 33948 | PSEN2:2097U21 sense siNA stab09 | B GUGUUCCCAAUGCUUUGUCTT B | 1858 |
| 104 | UUACUGAUGAAGAAACUGAGGCC | 1487 | 33949 | PSEN2:124L21 antisense siNA | CCUCAGUUUCUUCAUCAGUTsT | 1859 |
| | | | | (106C) stab10 | | |
| 260 | AGCCAGGGAGCAUCAUUCAUUUA | 1488 | 33950 | PSEN2:280L21 antisense siNA | AAUGAAUGAUGCUCCCUGGTsT | 1860 |
| | | | | (262C) stab10 | | |
| 549 | ACCGCUAUGUCUGUAGUGGGGUU | 1489 | 33951 | PSEN2:569L21 antisense siNA | CCCCACUACAGACAUAGCGTsT | 1861 |
| | | | | (551C) stab10 | | |
| 597 | AAGAGCUGACCCUCAAAUACGGA | 1490 | 33952 | PSEN2:617L21 antisense siNA | CGUAUUUGAGGGUCAGCUCTsT | 1862 |
| | | | | (599C) stab10 | | |
| 730 | CACGACAUUCACUGAGGACACAC | 1491 | 33953 | PSEN2:750L21 antisense siNA | GUGUCCUCAGUGAAUGUCGTsT | 1863 |
| | | | | (732C) stab10 | | |
| 938 | GUGCUCAAGACCUACAAUGUGGC | 1492 | 33954 | PSEN2:958L21 antisense siNA | CACAUUGUAGGUCUUGAGCTsT | 1864 |
| | | | | (940C) stab10 | | |
| 947 | ACCUACAAUGUGGCCAUGGACUA | 1493 | 33955 | PSEN2:967L21 antisense siNA | GUCCAUGGCCACAUUGUAGTsT | 1865 |
| | | | | (949C) stab10 | | |
| 2095 | GAGUGUUCCCAAUGCUUUGUCCA | 1494 | 33956 | PSEN2:2115L21 antisense siNA | GACAAAGCAUUGGGAACACTsT | 1866 |
| | | | | (2097C) stab10 | | |
| 104 | UUACUGAUGAAGAAACUGAGGCC | 1487 | | PSEN2:124L21 antisense siNA | ccucAGuuucuucAucAGuTT B | 1867 |
| | | | | (106C) stab19 | | |
| 260 | AGCCAGGGAGCAUCAUUCAUUUA | 1488 | | PSEN2:280L21 antisense siNA | AAuGAAuGAuGcucccuGGTT B | 1868 |
| | | | | (262C) stab19 | | |
| 549 | ACCGCUAUGUCUGUAGUGGGGUU | 1489 | | PSEN2:569L21 antisense siNA | ccccAcuAcAGAcAuAGcGTT B | 1869 |
| | | | | (551C) stab19 | | |
| 597 | AAGAGCUGACCCUCAAAUACGGA | 1490 | | PSEN2:617L21 antisense siNA | cGuAuuuGAGGGucAGcucTT B | 1870 |
| | | | | (599C) stab19 | | |
| 730 | CACGACAUUCACUGAGGACACAC | 1491 | | PSEN2:750L21 antisense siNA | GuGuccucAGuGAAuGucGTT B | 1871 |
| | | | | (732C) stab19 | | |
| 938 | GUGCUCAAGACCUACAAUGUGGC | 1492 | | PSEN2:958L21 antisense siNA | cAcAuuGuAGGucuuGAGcTT B | 1872 |
| | | | | (940C) stab19 | | |
| 947 | ACCUACAAUGUGGCCAUGGACUA | 1493 | | PSEN2:967L21 antisense siNA | GuccAuGGccAcAuuGuAGTT B | 1873 |
| | | | | (949C) stab19 | | |
| 2095 | GAGUGUUCCCAAUGCUUUGUCCA | 1494 | | PSEN2:2115L21 antisense siNA | GAcAAAGcAuuGGGAAcAcTT B | 1874 |
| | | | | (2097C) stab19 | | |
| 104 | UUACUGAUGAAGAAACUGAGGCC | 1487 | | PSEN2:124L21 antisense siNA | CCUCAGUUUCUUCAUCAGUTT B | 1875 |
| | | | | (106C) stab22 | | |
| 260 | AGCCAGGGAGCAUCAUUCAUUUA | 1488 | | PSEN2:280L21 antisense siNA | AAUGAAUGAUGCUCCCUGGTT B | 1876 |
| | | | | (262C) stab22 | | |
| 549 | ACCGCUAUGUCUGUAGUGGGGUU | 1489 | | PSEN2:569L21 antisense siNA | CCCCACUACAGACAUAGCGTT B | 1877 |
| | | | | (551C) stab22 | | |
| 597 | AAGAGCUGACCCUCAAAUACGGA | 1490 | | PSEN2:617L21 antisense siNA | CGUAUUUGAGGGUCAGCUCTT B | 1878 |
| | | | | (599C) stab22 | | |
| 730 | CACGACAUUCACUGAGGACACAC | 1491 | | PSEN2:750L21 antisense siNA | GUGUCCUCAGUGAAUGUCGTT B | 1879 |
| | | | | (732C) stab22 | | |
| 938 | GUGCUCAAGACCUACAAUGUGGC | 1492 | | PSEN2:958L21 antisense siNA | CACAUUGUAGGUCUUGAGCTT B | 1880 |
| | | | | (940C) stab22 | | |
| 947 | ACCUACAAUGUGGCCAUGGACUA | 1493 | | PSEN2:967L21 antisense siNA | GUCCAUGGCCACAUUGUAGTT B | 1881 |
| | | | | (949C) stab22 | | |
| 2095 | GAGUGUUCCCAAUGCUUUGUCCA | 1494 | | PSEN2:2115L21 antisense siNA | GACAAAGCAUUGGGAACACTT B | 1882 |
| | | | | (2097C) stab22 | | |

Uppercase = ribonucleotide
u,c = 2′-deoxy-2′-fluoro U,C
T = thymidine
B = inverted deoxy abasic
s = phosphorothioate linkage
A = deoxy Adenosine
G = deoxy Guanosine
G = 2′-O-methyl Guanosine
A = 2′-O-methyl Adenosine

[0422] TABLE IV
Non-limiting examples of Stabilization Chemistries
for chemically modified siNA constructs

| Chemistry | pyrimidine | Purine | cap | p = S | Strand |
|---|---|---|---|---|---|
| “Stab 00” | Ribo | Ribo | TT at | | S/AS |
| | | | 3′-ends | | |
| “Stab 1” | Ribo | Ribo | — | 5 at 5′-end | S/AS |
| | | | | 1 at 3′-end | |
| “Stab 2” | Ribo | Ribo | — | All | Usually AS |
| | | | | linkages | |
| “Stab 3” | 2′-fluoro | Ribo | — | 4 at 5′-end | Usually S |
| | | | | 4 at 3′-end | |
| “Stab 4” | 2′-fluoro | Ribo | 5′ and | — | Usually S |
| | | | 3′-ends | | |
| “Stab 5” | 2′-fluoro | Ribo | — | 1 at 3′-end | Usually AS |
| “Stab 6” | 2′-O-Methyl | Ribo | 5′ and | — | Usually S |
| | | | 3′-ends | | |
| “Stab 7” | 2′-fluoro | 2′-deoxy | 5′ and | — | Usually S |
| | | | 3′-ends | | |
| “Stab 8” | 2′-fluoro | 2′-O-Methyl | — | 1 at 3′-end | Usually AS |
| “Stab 9” | Ribo | Ribo | 5′ and | — | Usually S |
| | | | 3′-ends | | |
| “Stab 10” | Ribo | Ribo | — | 1 at 3′-end | Usually AS |
| “Stab 11” | 2′-fluoro | 2′-deoxy | — | 1 at 3′-end | Usually AS |
| “Stab 12” | 2′-fluoro | LNA | 5′ and | | Usually S |
| | | | 3′-ends | | |
| “Stab 13” | 2′-fluoro | LNA | | 1 at 3′-end | Usually AS |
| “Stab 14” | 2′-fluoro | 2′-deoxy | | 2 at 5′-end | Usually AS |
| | | | | 1 at 3′-end | |
| “Stab 15” | 2′-deoxy | 2′-deoxy | | 2 at 5′-end | Usually AS |
| | | | | 1 at 3′-end | |
| “Stab 16 | Ribo | 2′-O-Methyl | 5′ and | | Usually S |
| | | | 3′-ends | | |
| “Stab 17” | 2′-O-Methyl | 2′-O-Methyl | 5′ and | | Usually S |
| | | | 3′-ends | | |
| “Stab 18” | 2′-fluoro | 2′-O-Methyl | 5′ and | | Usually S |
| | | | 3′-ends | | |
| “Stab 19” | 2′-fluoro | 2′-O-Methyl | 3′-end | | Usually AS |
| “Stab 20” | 2′-fluoro | 2′-deoxy | 3′-end | | Usually AS |
| “Stab 21” | 2′-fluoro | Ribo | 3′-end | | Usually AS |
| “Stab 22” | Ribo | Ribo | 3′-end- | | Usually AS |
| “Stab 23” | 2′-fluoro* | 2′-deoxy* | 5′ and | | Usually S |
| | | | 3′-ends | | |
| “Stab 24” | 2′-fluoro* | 2′-O-Methyl* | — | 1 at 3′-end | Usually AS |
| “Stab 25” | 2′-fluoro* | 2′-O-Methyl* | — | 1 at 3′-end | Usually AS |

CAP = any terminal cap, see for example FIG. 10.
All Stab 00-25 chemistries can comprise 3′-terminal thymidine (TT) residues
All Stab 00-25 chemistries typically comprise about 21 nucleotides, but can vary as described herein.
S = sense strand
AS = antisense strand
*Stab 23 has single ribonucleotide adjacent to 3′-CAP
*Stab 24 has single ribonucleotide at 5′-terminus
*Stab 25 has three ribonucleotides at 5′-terminus

[0423] TABLE V

| | | | | | |
|---|---|---|---|---|---|
| Reagent | Equivalents | Amount | Wait Time* DNA | Wait Time* 2′-O-methyl | Wait Time*RNA |

A. 2.5 μmol Synthesis Cycle ABI 394 Instrument

| | | | | | | | | | |
|---|---|---|---|---|---|---|---|---|---|
| Phosphoramidites | 6.5 | 163 | μL | 45 | sec | 2.5 | min | 7.5 | min |
| S-Ethyl Tetrazole | 23.8 | 238 | μL | 45 | sec | 2.5 | min | 7.5 | min |
| Acetic Anhydride | 100 | 233 | μL | 5 | sec | 5 | sec | 5 | sec |
| N-Methyl Imidazole | 186 | 233 | μL | 5 | sec | 5 | sec | 5 | sec |
| TCA | 176 | 2.3 | mL | 21 | sec | 21 | sec | 21 | sec |
| Iodine | 11.2 | 1.7 | mL | 45 | sec | 45 | sec | 45 | sec |
| Beaucage | 12.9 | 645 | μL | 100 | sec | 300 | sec | 300 | sec |

| | | | | | | |
|---|---|---|---|---|---|---|
| Acetonitrile | NA | 6.67 | mL | NA | NA | NA |

B. 0.2 μmol Synthesis Cycle ABI 394 Instrument

| | | | | | | | | | |
|---|---|---|---|---|---|---|---|---|---|
| Phosphoramidites | 15 | 31 | μL | 45 | sec | 233 | sec | 465 | sec |
| S-Ethyl Tetrazole | 38.7 | 31 | μL | 45 | sec | 233 | min | 465 | sec |
| Acetic Anhydride | 655 | 124 | μL | 5 | sec | 5 | sec | 5 | sec |
| N-Methyl Imidazole | 1245 | 124 | μL | 5 | sec | 5 | sec | 5 | sec |
| TCA | 700 | 732 | μL | 10 | sec | 10 | sec | 10 | sec |
| Iodine | 20.6 | 244 | μL | 15 | sec | 15 | sec | 15 | sec |
| Beaucage | 7.7 | 232 | μL | 100 | sec | 300 | sec | 300 | sec |

| | | | | | | |
|---|---|---|---|---|---|---|
| Acetonitrile | NA | 2.64 | mL | NA | NA | NA |

C. 0.2 μmol Synthesis Cycle 96 well Instrument

| | Equivalents: DNA/ | Amount: DNA/2′-O- | | | | Wait Time* 2′-O- | | | |
|---|---|---|---|---|---|---|---|---|---|
| Reagent | 2′-O-methyl/Ribo | methyl/Ribo | | Wait Time* DNA | | methyl | | Wait Time* Ribo | |
| Phosphoramidites | 22/33/66 | 40/60/120 | μL | 60 | sec | 180 | sec | 360 | sec |
| S-Ethyl Tetrazole | 70/105/210 | 40/60/120 | μL | 60 | sec | 180 | min | 360 | sec |
| Acetic Anhydride | 265/265/265 | 50/50/50 | μL | 10 | sec | 10 | sec | 10 | sec |
| N-Methyl Imidazole | 502/502/502 | 50/50/50 | μL | 10 | sec | 10 | sec | 10 | sec |
| TCA | 238/475/475 | 250/500/500 | μL | 15 | sec | 15 | sec | 15 | sec |
| Iodine | 6.8/6.8/6.8 | 80/80/80 | μL | 30 | sec | 30 | sec | 30 | sec |
| Beaucage | 34/51/51 | 80/120/120 | | 100 | sec | 200 | sec | 200 | sec |

| | | | | | | |
|---|---|---|---|---|---|---|
| Acetonitrile | NA | 1150/1150/1150 | μL | NA | NA | NA |

Wait time does not include contact time during delivery.
Tandem synthesis utilizes double coupling of linker molecule

The application's sequence listing, which the Patent Office published only in electronic form, follows.

SEQUENCE LISTING (1905 sequences)

SEQ ID NO: 1 - RNA, 19 nt, Artificial Sequence
  Description of Artificial Sequence:  Synthetic
uuuccucggcagcgguagg

SEQ ID NO: 2 - RNA, 19 nt, Artificial Sequence
  Description of Artificial Sequence:  Synthetic
gcgagagcacgcggaggag

SEQ ID NO: 3 - RNA, 19 nt, Artificial Sequence
  Description of Artificial Sequence:  Synthetic
gcgugcgcgggggccccgg

SEQ ID NO: 4 - RNA, 19 nt, Artificial Sequence
  Description of Artificial Sequence:  Synthetic
ggagacggcggcgguggcg

SEQ ID NO: 5 - RNA, 19 nt, Artificial Sequence
  Description of Artificial Sequence:  Synthetic
ggcgcgggcagagcaagga

SEQ ID NO: 6 - RNA, 19 nt, Artificial Sequence
  Description of Artificial Sequence:  Synthetic
acgcggcggaucccacucg

SEQ ID NO: 7 - RNA, 19 nt, Artificial Sequence
  Description of Artificial Sequence:  Synthetic
gcacagcagcgcacucggu

SEQ ID NO: 8 - RNA, 19 nt, Artificial Sequence
  Description of Artificial Sequence:  Synthetic
ugccccgcgcagggucgcg

SEQ ID NO: 9 - RNA, 19 nt, Artificial Sequence
  Description of Artificial Sequence:  Synthetic
gaugcugcccgguuuggca

SEQ ID NO: 10 - RNA, 19 nt, Artificial Sequence
  Description of Artificial Sequence:  Synthetic
acugcuccugcuggccgcc

SEQ ID NO: 11 - RNA, 19 nt, Artificial Sequence
  Description of Artificial Sequence:  Synthetic
cuggacggcucgggcgcug

SEQ ID NO: 12 - RNA, 19 nt, Artificial Sequence
  Description of Artificial Sequence:  Synthetic
ggagguacccacugauggu

SEQ ID NO: 13 - RNA, 19 nt, Artificial Sequence
  Description of Artificial Sequence:  Synthetic
uaaugcuggccugcuggcu

SEQ ID NO: 14 - RNA, 19 nt, Artificial Sequence
  Description of Artificial Sequence:  Synthetic
ugaaccccagauugccaug

SEQ ID NO: 15 - RNA, 19 nt, Artificial Sequence
  Description of Artificial Sequence:  Synthetic
guucuguggcagacugaac

SEQ ID NO: 16 - RNA, 19 nt, Artificial Sequence
  Description of Artificial Sequence:  Synthetic
caugcacaugaauguccag

SEQ ID NO: 17 - RNA, 19 nt, Artificial Sequence
  Description of Artificial Sequence:  Synthetic
gaaugggaagugggauuca

SEQ ID NO: 18 - RNA, 19 nt, Artificial Sequence
  Description of Artificial Sequence:  Synthetic
agauccaucagggaccaaa

SEQ ID NO: 19 - RNA, 19 nt, Artificial Sequence
  Description of Artificial Sequence:  Synthetic
aaccugcauugauaccaag

SEQ ID NO: 20 - RNA, 19 nt, Artificial Sequence
  Description of Artificial Sequence:  Synthetic
ggaaggcauccugcaguau

SEQ ID NO: 21 - RNA, 19 nt, Artificial Sequence
  Description of Artificial Sequence:  Synthetic
uugccaagaagucuacccu

SEQ ID NO: 22 - RNA, 19 nt, Artificial Sequence
  Description of Artificial Sequence:  Synthetic
ugaacugcagaucaccaau

SEQ ID NO: 23 - RNA, 19 nt, Artificial Sequence
  Description of Artificial Sequence:  Synthetic
ugugguagaagccaaccaa

SEQ ID NO: 24 - RNA, 19 nt, Artificial Sequence
  Description of Artificial Sequence:  Synthetic
accagugaccauccagaac

SEQ ID NO: 25 - RNA, 19 nt, Artificial Sequence
  Description of Artificial Sequence:  Synthetic
cuggugcaagcggggccgc

SEQ ID NO: 26 - RNA, 19 nt, Artificial Sequence
  Description of Artificial Sequence:  Synthetic
caagcagugcaagacccau

SEQ ID NO: 27 - RNA, 19 nt, Artificial Sequence
  Description of Artificial Sequence:  Synthetic
uccccacuuugugauuccc

SEQ ID NO: 28 - RNA, 19 nt, Artificial Sequence
  Description of Artificial Sequence:  Synthetic
cuaccgcugcuuaguuggu

SEQ ID NO: 29 - RNA, 19 nt, Artificial Sequence
  Description of Artificial Sequence:  Synthetic
ugaguuuguaagugaugcc

SEQ ID NO: 30 - RNA, 19 nt, Artificial Sequence
  Description of Artificial Sequence:  Synthetic
ccuucucguuccugacaag

SEQ ID NO: 31 - RNA, 19 nt, Artificial Sequence
  Description of Artificial Sequence:  Synthetic
gugcaaauucuuacaccag

SEQ ID NO: 32 - RNA, 19 nt, Artificial Sequence
  Description of Artificial Sequence:  Synthetic
ggagaggauggauguuugc

SEQ ID NO: 33 - RNA, 19 nt, Artificial Sequence
  Description of Artificial Sequence:  Synthetic
cgaaacucaucuucacugg

SEQ ID NO: 34 - RNA, 19 nt, Artificial Sequence
  Description of Artificial Sequence:  Synthetic
gcacaccgucgccaaagag

SEQ ID NO: 35 - RNA, 19 nt, Artificial Sequence
  Description of Artificial Sequence:  Synthetic
gacaugcagugagaagagu

SEQ ID NO: 36 - RNA, 19 nt, Artificial Sequence
  Description of Artificial Sequence:  Synthetic
uaccaacuugcaugacuac

SEQ ID NO: 37 - RNA, 19 nt, Artificial Sequence
  Description of Artificial Sequence:  Synthetic
cggcauguugcugcccugc

SEQ ID NO: 38 - RNA, 19 nt, Artificial Sequence
  Description of Artificial Sequence:  Synthetic
cggaauugacaaguuccga

SEQ ID NO: 39 - RNA, 19 nt, Artificial Sequence
  Description of Artificial Sequence:  Synthetic
agggguagaguuugugugu

SEQ ID NO: 40 - RNA, 19 nt, Artificial Sequence
  Description of Artificial Sequence:  Synthetic
uugcccacuggcugaagaa

SEQ ID NO: 41 - RNA, 19 nt, Artificial Sequence
  Description of Artificial Sequence:  Synthetic
aagugacaauguggauucu

SEQ ID NO: 42 - RNA, 19 nt, Artificial Sequence
  Description of Artificial Sequence:  Synthetic
ugcugaugcggaggaggau

SEQ ID NO: 43 - RNA, 19 nt, Artificial Sequence
  Description of Artificial Sequence:  Synthetic
ugacucggaugucuggugg

SEQ ID NO: 44 - RNA, 19 nt, Artificial Sequence
  Description of Artificial Sequence:  Synthetic
gggcggagcagacacagac

SEQ ID NO: 45 - RNA, 19 nt, Artificial Sequence
  Description of Artificial Sequence:  Synthetic
cuaugcagaugggagugaa

SEQ ID NO: 46 - RNA, 19 nt, Artificial Sequence
  Description of Artificial Sequence:  Synthetic
agacaaaguaguagaagua

SEQ ID NO: 47 - RNA, 19 nt, Artificial Sequence
  Description of Artificial Sequence:  Synthetic
agcagaggaggaagaagug

SEQ ID NO: 48 - RNA, 19 nt, Artificial Sequence
  Description of Artificial Sequence:  Synthetic
ggcugagguggaagaagaa

SEQ ID NO: 49 - RNA, 19 nt, Artificial Sequence
  Description of Artificial Sequence:  Synthetic
agaagccgaugaugacgag

SEQ ID NO: 50 - RNA, 19 nt, Artificial Sequence
  Description of Artificial Sequence:  Synthetic
ggacgaugaggauggugau

SEQ ID NO: 51 - RNA, 19 nt, Artificial Sequence
  Description of Artificial Sequence:  Synthetic
ugagguagaggaagaggcu

SEQ ID NO: 52 - RNA, 19 nt, Artificial Sequence
  Description of Artificial Sequence:  Synthetic
ugaggaacccuacgaagaa

SEQ ID NO: 53 - RNA, 19 nt, Artificial Sequence
  Description of Artificial Sequence:  Synthetic
agccacagagagaaccacc

SEQ ID NO: 54 - RNA, 19 nt, Artificial Sequence
  Description of Artificial Sequence:  Synthetic
cagcauugccaccaccacc

SEQ ID NO: 55 - RNA, 19 nt, Artificial Sequence
  Description of Artificial Sequence:  Synthetic
caccaccaccacagagucu

SEQ ID NO: 56 - RNA, 19 nt, Artificial Sequence
  Description of Artificial Sequence:  Synthetic
uguggaagaggugguucga

SEQ ID NO: 57 - RNA, 19 nt, Artificial Sequence
  Description of Artificial Sequence:  Synthetic
agaggugugcucugaacaa

SEQ ID NO: 58 - RNA, 19 nt, Artificial Sequence
  Description of Artificial Sequence:  Synthetic
agccgagacggggccgugc

SEQ ID NO: 59 - RNA, 19 nt, Artificial Sequence
  Description of Artificial Sequence:  Synthetic
ccgagcaaugaucucccgc

SEQ ID NO: 60 - RNA, 19 nt, Artificial Sequence
  Description of Artificial Sequence:  Synthetic
cugguacuuugaugugacu

SEQ ID NO: 61 - RNA, 19 nt, Artificial Sequence
  Description of Artificial Sequence:  Synthetic
ugaagggaagugugcccca

SEQ ID NO: 62 - RNA, 19 nt, Artificial Sequence
  Description of Artificial Sequence:  Synthetic
auucuuuuacggcggaugu

SEQ ID NO: 63 - RNA, 19 nt, Artificial Sequence
  Description of Artificial Sequence:  Synthetic
uggcggcaaccggaacaac

SEQ ID NO: 64 - RNA, 19 nt, Artificial Sequence
  Description of Artificial Sequence:  Synthetic
cuuugacacagaagaguac

SEQ ID NO: 65 - RNA, 19 nt, Artificial Sequence
  Description of Artificial Sequence:  Synthetic
cugcauggccguguguggc

SEQ ID NO: 66 - RNA, 19 nt, Artificial Sequence
  Description of Artificial Sequence:  Synthetic
cagcgccaugucccaaagu

SEQ ID NO: 67 - RNA, 19 nt, Artificial Sequence
  Description of Artificial Sequence:  Synthetic
uuuacucaagacuacccag

SEQ ID NO: 68 - RNA, 19 nt, Artificial Sequence
  Description of Artificial Sequence:  Synthetic
ggaaccucuugcccgagau

SEQ ID NO: 69 - RNA, 19 nt, Artificial Sequence
  Description of Artificial Sequence:  Synthetic
uccuguuaaacuuccuaca

SEQ ID NO: 70 - RNA, 19 nt, Artificial Sequence
  Description of Artificial Sequence:  Synthetic
aacagcagccaguaccccu

SEQ ID NO: 71 - RNA, 19 nt, Artificial Sequence
  Description of Artificial Sequence:  Synthetic
ugaugccguugacaaguau

SEQ ID NO: 72 - RNA, 19 nt, Artificial Sequence
  Description of Artificial Sequence:  Synthetic
ucucgagacaccuggggau

SEQ ID NO: 73 - RNA, 19 nt, Artificial Sequence
  Description of Artificial Sequence:  Synthetic
ugagaaugaacaugcccau

SEQ ID NO: 74 - RNA, 19 nt, Artificial Sequence
  Description of Artificial Sequence:  Synthetic
uuuccagaaagccaaagag

SEQ ID NO: 75 - RNA, 19 nt, Artificial Sequence
  Description of Artificial Sequence:  Synthetic
gaggcuugaggccaagcac

SEQ ID NO: 76 - RNA, 19 nt, Artificial Sequence
  Description of Artificial Sequence:  Synthetic
ccgagagagaaugucccag

SEQ ID NO: 77 - RNA, 19 nt, Artificial Sequence
  Description of Artificial Sequence:  Synthetic
ggucaugagagaaugggaa

SEQ ID NO: 78 - RNA, 19 nt, Artificial Sequence
  Description of Artificial Sequence:  Synthetic
agaggcagaacgucaagca

SEQ ID NO: 79 - RNA, 19 nt, Artificial Sequence
  Description of Artificial Sequence:  Synthetic
aaagaacuugccuaaagcu

SEQ ID NO: 80 - RNA, 19 nt, Artificial Sequence
  Description of Artificial Sequence:  Synthetic
ugauaagaaggcaguuauc

SEQ ID NO: 81 - RNA, 19 nt, Artificial Sequence
  Description of Artificial Sequence:  Synthetic
ccagcauuuccaggagaaa

SEQ ID NO: 82 - RNA, 19 nt, Artificial Sequence
  Description of Artificial Sequence:  Synthetic
aguggaaucuuuggaacag

SEQ ID NO: 83 - RNA, 19 nt, Artificial Sequence
  Description of Artificial Sequence:  Synthetic
ggaagcagccaacgagaga

SEQ ID NO: 84 - RNA, 19 nt, Artificial Sequence
  Description of Artificial Sequence:  Synthetic
acagcagcugguggagaca

SEQ ID NO: 85 - RNA, 19 nt, Artificial Sequence
  Description of Artificial Sequence:  Synthetic
acacauggccagaguggaa

SEQ ID NO: 86 - RNA, 19 nt, Artificial Sequence
  Description of Artificial Sequence:  Synthetic
agccaugcucaaugaccgc

SEQ ID NO: 87 - RNA, 19 nt, Artificial Sequence
  Description of Artificial Sequence:  Synthetic
ccgccgccuggcccuggag

SEQ ID NO: 88 - RNA, 19 nt, Artificial Sequence
  Description of Artificial Sequence:  Synthetic
gaacuacaucaccgcucug

SEQ ID NO: 89 - RNA, 19 nt, Artificial Sequence
  Description of Artificial Sequence:  Synthetic
gcaggcuguuccuccucgg

SEQ ID NO: 90 - RNA, 19 nt, Artificial Sequence
  Description of Artificial Sequence:  Synthetic
gccucgucacguguucaau

SEQ ID NO: 91 - RNA, 19 nt, Artificial Sequence
  Description of Artificial Sequence:  Synthetic
uaugcuaaagaaguauguc

SEQ ID NO: 92 - RNA, 19 nt, Artificial Sequence
  Description of Artificial Sequence:  Synthetic
ccgcgcagaacagaaggac

SEQ ID NO: 93 - RNA, 19 nt, Artificial Sequence
  Description of Artificial Sequence:  Synthetic
cagacagcacacccuaaag

SEQ ID NO: 94 - RNA, 19 nt, Artificial Sequence
  Description of Artificial Sequence:  Synthetic
gcauuucgagcaugugcgc

SEQ ID NO: 95 - RNA, 19 nt, Artificial Sequence
  Description of Artificial Sequence:  Synthetic
caugguggaucccaagaaa

SEQ ID NO: 96 - RNA, 19 nt, Artificial Sequence
  Description of Artificial Sequence:  Synthetic
agccgcucagauccggucc

SEQ ID NO: 97 - RNA, 19 nt, Artificial Sequence
  Description of Artificial Sequence:  Synthetic
ccagguuaugacacaccuc

SEQ ID NO: 98 - RNA, 19 nt, Artificial Sequence
  Description of Artificial Sequence:  Synthetic
ccgugugauuuaugagcgc

SEQ ID NO: 99 - RNA, 19 nt, Artificial Sequence
  Description of Artificial Sequence:  Synthetic
caugaaucagucucucucc

SEQ ID NO: 100 - RNA, 19 nt, Artificial Sequence
  Description of Artificial Sequence:  Synthetic
ccugcucuacaacgugccu

SEQ ID NO: 101 - RNA, 19 nt, Artificial Sequence
  Description of Artificial Sequence:  Synthetic
ugcaguggccgaggagauu

SEQ ID NO: 102 - RNA, 19 nt, Artificial Sequence
  Description of Artificial Sequence:  Synthetic
ucaggaugaaguugaugag

SEQ ID NO: 103 - RNA, 19 nt, Artificial Sequence
  Description of Artificial Sequence:  Synthetic
gcugcuucagaaagagcaa

SEQ ID NO: 104 - RNA, 19 nt, Artificial Sequence
  Description of Artificial Sequence:  Synthetic
aaacuauucagaugacguc

SEQ ID NO: 105 - RNA, 19 nt, Artificial Sequence
  Description of Artificial Sequence:  Synthetic
cuuggccaacaugauuagu

SEQ ID NO: 106 - RNA, 19 nt, Artificial Sequence
  Description of Artificial Sequence:  Synthetic
ugaaccaaggaucaguuac

SEQ ID NO: 107 - RNA, 19 nt, Artificial Sequence
  Description of Artificial Sequence:  Synthetic
cggaaacgaugcucucaug

SEQ ID NO: 108 - RNA, 19 nt, Artificial Sequence
  Description of Artificial Sequence:  Synthetic
gccaucuuugaccgaaacg

SEQ ID NO: 109 - RNA, 19 nt, Artificial Sequence
  Description of Artificial Sequence:  Synthetic
gaaaaccaccguggagcuc

SEQ ID NO: 110 - RNA, 19 nt, Artificial Sequence
  Description of Artificial Sequence:  Synthetic
ccuucccgugaauggagag

SEQ ID NO: 111 - RNA, 19 nt, Artificial Sequence
  Description of Artificial Sequence:  Synthetic
guucagccuggacgaucuc

SEQ ID NO: 112 - RNA, 19 nt, Artificial Sequence
  Description of Artificial Sequence:  Synthetic
ccagccguggcauucuuuu

SEQ ID NO: 113 - RNA, 19 nt, Artificial Sequence
  Description of Artificial Sequence:  Synthetic
uggggcugacucugugcca

SEQ ID NO: 114 - RNA, 19 nt, Artificial Sequence
  Description of Artificial Sequence:  Synthetic
agccaacacagaaaacgaa

SEQ ID NO: 115 - RNA, 19 nt, Artificial Sequence
  Description of Artificial Sequence:  Synthetic
aguugagccuguugaugcc

SEQ ID NO: 116 - RNA, 19 nt, Artificial Sequence
  Description of Artificial Sequence:  Synthetic
ccgcccugcugccgaccga

SEQ ID NO: 117 - RNA, 19 nt, Artificial Sequence
  Description of Artificial Sequence:  Synthetic
aggacugaccacucgacca

SEQ ID NO: 118 - RNA, 19 nt, Artificial Sequence
  Description of Artificial Sequence:  Synthetic
agguucuggguugacaaau

SEQ ID NO: 119 - RNA, 19 nt, Artificial Sequence
  Description of Artificial Sequence:  Synthetic
uaucaagacggaggagauc

SEQ ID NO: 120 - RNA, 19 nt, Artificial Sequence
  Description of Artificial Sequence:  Synthetic
cucugaagugaagauggau

SEQ ID NO: 121 - RNA, 19 nt, Artificial Sequence
  Description of Artificial Sequence:  Synthetic
ugcagaauuccgacaugac

SEQ ID NO: 122 - RNA, 19 nt, Artificial Sequence
  Description of Artificial Sequence:  Synthetic
cucaggauaugaaguucau

SEQ ID NO: 123 - RNA, 19 nt, Artificial Sequence
  Description of Artificial Sequence:  Synthetic
ucaucaaaaauugguguuc

SEQ ID NO: 124 - RNA, 19 nt, Artificial Sequence
  Description of Artificial Sequence:  Synthetic
cuuugcagaagaugugggu

SEQ ID NO: 125 - RNA, 19 nt, Artificial Sequence
  Description of Artificial Sequence:  Synthetic
uucaaacaaaggugcaauc

SEQ ID NO: 126 - RNA, 19 nt, Artificial Sequence
  Description of Artificial Sequence:  Synthetic
cauuggacucauggugggc

SEQ ID NO: 127 - RNA, 19 nt, Artificial Sequence
  Description of Artificial Sequence:  Synthetic
cgguguugucauagcgaca

SEQ ID NO: 128 - RNA, 19 nt, Artificial Sequence
  Description of Artificial Sequence:  Synthetic
agugaucgucaucaccuug

SEQ ID NO: 129 - RNA, 19 nt, Artificial Sequence
  Description of Artificial Sequence:  Synthetic
ggugaugcugaagaagaaa

SEQ ID NO: 130 - RNA, 19 nt, Artificial Sequence
  Description of Artificial Sequence:  Synthetic
acaguacacauccauucau

SEQ ID NO: 131 - RNA, 19 nt, Artificial Sequence
  Description of Artificial Sequence:  Synthetic
ucauggugugguggagguu

SEQ ID NO: 132 - RNA, 19 nt, Artificial Sequence
  Description of Artificial Sequence:  Synthetic
ugacgccgcugucacccca

SEQ ID NO: 133 - RNA, 19 nt, Artificial Sequence
  Description of Artificial Sequence:  Synthetic
agaggagcgccaccugucc

SEQ ID NO: 134 - RNA, 19 nt, Artificial Sequence
  Description of Artificial Sequence:  Synthetic
caagaugcagcagaacggc

SEQ ID NO: 135 - RNA, 19 nt, Artificial Sequence
  Description of Artificial Sequence:  Synthetic
cuacgaaaauccaaccuac

SEQ ID NO: 136 - RNA, 19 nt, Artificial Sequence
  Description of Artificial Sequence:  Synthetic
caaguucuuugagcagaug

SEQ ID NO: 137 - RNA, 19 nt, Artificial Sequence
  Description of Artificial Sequence:  Synthetic
gcagaacuagacccccgcc

SEQ ID NO: 138 - RNA, 19 nt, Artificial Sequence
  Description of Artificial Sequence:  Synthetic
cacagcagccucugaaguu

SEQ ID NO: 139 - RNA, 19 nt, Artificial Sequence
  Description of Artificial Sequence:  Synthetic
uggacagcaaaaccauugc

SEQ ID NO: 140 - RNA, 19 nt, Artificial Sequence
  Description of Artificial Sequence:  Synthetic
cuucacuacccaucggugu

SEQ ID NO: 141 - RNA, 19 nt, Artificial Sequence
  Description of Artificial Sequence:  Synthetic
uccauuuauagaauaaugu

SEQ ID NO: 142 - RNA, 19 nt, Artificial Sequence
  Description of Artificial Sequence:  Synthetic
ugggaagaaacaaacccgu

SEQ ID NO: 143 - RNA, 19 nt, Artificial Sequence
  Description of Artificial Sequence:  Synthetic
uuuuaugauuuacucauua

SEQ ID NO: 144 - RNA, 19 nt, Artificial Sequence
  Description of Artificial Sequence:  Synthetic
aucgccuuuugacagcugu

SEQ ID NO: 145 - RNA, 19 nt, Artificial Sequence
  Description of Artificial Sequence:  Synthetic
ugcuguaacacaaguagau

SEQ ID NO: 146 - RNA, 19 nt, Artificial Sequence
  Description of Artificial Sequence:  Synthetic
ugccugaacuugaauuaau

SEQ ID NO: 147 - RNA, 19 nt, Artificial Sequence
  Description of Artificial Sequence:  Synthetic
uccacacaucaguaaugua

SEQ ID NO: 148 - RNA, 19 nt, Artificial Sequence
  Description of Artificial Sequence:  Synthetic
auucuaucucucuuuacau

SEQ ID NO: 149 - RNA, 19 nt, Artificial Sequence
  Description of Artificial Sequence:  Synthetic
uuuuggucucuauacuaca

SEQ ID NO: 150 - RNA, 19 nt, Artificial Sequence
  Description of Artificial Sequence:  Synthetic
auuauuaauggguuuugug

SEQ ID NO: 151 - RNA, 19 nt, Artificial Sequence
  Description of Artificial Sequence:  Synthetic
guacuguaaagaauuuagc

SEQ ID NO: 152 - RNA, 19 nt, Artificial Sequence
  Description of Artificial Sequence:  Synthetic
cuguaucaaacuagugcau

SEQ ID NO: 153 - RNA, 19 nt, Artificial Sequence
  Description of Artificial Sequence:  Synthetic
ugaauagauucucuccuga

SEQ ID NO: 154 - RNA, 19 nt, Artificial Sequence
  Description of Artificial Sequence:  Synthetic
auuauuuaucacauagccc

SEQ ID NO: 155 - RNA, 19 nt, Artificial Sequence
  Description of Artificial Sequence:  Synthetic
ccuuagccaguuguauauu

SEQ ID NO: 156 - RNA, 19 nt, Artificial Sequence
  Description of Artificial Sequence:  Synthetic
uauucuugugguuugugac

SEQ ID NO: 157 - RNA, 19 nt, Artificial Sequence
  Description of Artificial Sequence:  Synthetic
cccaauuaaguccuacuuu

SEQ ID NO: 158 - RNA, 19 nt, Artificial Sequence
  Description of Artificial Sequence:  Synthetic
uacauaugcuuuaagaauc

SEQ ID NO: 159 - RNA, 19 nt, Artificial Sequence
  Description of Artificial Sequence:  Synthetic
cgaugggggaugcuucaug

SEQ ID NO: 160 - RNA, 19 nt, Artificial Sequence
  Description of Artificial Sequence:  Synthetic
gugaacgugggaguucagc

SEQ ID NO: 161 - RNA, 19 nt, Artificial Sequence
  Description of Artificial Sequence:  Synthetic
cugcuucucuugccuaagu

SEQ ID NO: 162 - RNA, 19 nt, Artificial Sequence
  Description of Artificial Sequence:  Synthetic
uauuccuuuccugaucacu

SEQ ID NO: 163 - RNA, 19 nt, Artificial Sequence
  Description of Artificial Sequence:  Synthetic
uaugcauuuuaaaguuaaa

SEQ ID NO: 164 - RNA, 19 nt, Artificial Sequence
  Description of Artificial Sequence:  Synthetic
acauuuuuaaguauuucag

SEQ ID NO: 165 - RNA, 19 nt, Artificial Sequence
  Description of Artificial Sequence:  Synthetic
gaugcuuuagagagauuuu

SEQ ID NO: 166 - RNA, 19 nt, Artificial Sequence
  Description of Artificial Sequence:  Synthetic
uuuuuccaugacugcauuu

SEQ ID NO: 167 - RNA, 19 nt, Artificial Sequence
  Description of Artificial Sequence:  Synthetic
uuacuguacagauugcugc

SEQ ID NO: 168 - RNA, 19 nt, Artificial Sequence
  Description of Artificial Sequence:  Synthetic
cuucugcuauauuugugau

SEQ ID NO: 169 - RNA, 19 nt, Artificial Sequence
  Description of Artificial Sequence:  Synthetic
uauaggaauuaagaggaua

SEQ ID NO: 170 - RNA, 19 nt, Artificial Sequence
  Description of Artificial Sequence:  Synthetic
acacacguuuguuucuucg

SEQ ID NO: 171 - RNA, 19 nt, Artificial Sequence
  Description of Artificial Sequence:  Synthetic
gugccuguuuuaugugcac

SEQ ID NO: 172 - RNA, 19 nt, Artificial Sequence
  Description of Artificial Sequence:  Synthetic
cacauuaggcauugagacu

SEQ ID NO: 173 - RNA, 19 nt, Artificial Sequence
  Description of Artificial Sequence:  Synthetic
uucaagcuuuucuuuuuuu

SEQ ID NO: 174 - RNA, 19 nt, Artificial Sequence
  Description of Artificial Sequence:  Synthetic
uguccacguaucuuugggu

SEQ ID NO: 175 - RNA, 19 nt, Artificial Sequence
  Description of Artificial Sequence:  Synthetic
ucuuugauaaagaaaagaa

SEQ ID NO: 176 - RNA, 19 nt, Artificial Sequence
  Description of Artificial Sequence:  Synthetic
aucccuguucauuguaagc

SEQ ID NO: 177 - RNA, 19 nt, Artificial Sequence
  Description of Artificial Sequence:  Synthetic
cacuuuuacggggcgggug

SEQ ID NO: 178 - RNA, 19 nt, Artificial Sequence
  Description of Artificial Sequence:  Synthetic
ggggaggggugcucugcug

SEQ ID NO: 179 - RNA, 19 nt, Artificial Sequence
  Description of Artificial Sequence:  Synthetic
ggucuucaauuaccaagaa

SEQ ID NO: 180 - RNA, 19 nt, Artificial Sequence
  Description of Artificial Sequence:  Synthetic
auucuccaaaacaauuuuc

SEQ ID NO: 181 - RNA, 19 nt, Artificial Sequence
  Description of Artificial Sequence:  Synthetic
cugcaggaugauuguacag

SEQ ID NO: 182 - RNA, 19 nt, Artificial Sequence
  Description of Artificial Sequence:  Synthetic
gaaucauugcuuaugacau

SEQ ID NO: 183 - RNA, 19 nt, Artificial Sequence
  Description of Artificial Sequence:  Synthetic
ugaucgcuuucuacacugu

SEQ ID NO: 184 - RNA, 19 nt, Artificial Sequence
  Description of Artificial Sequence:  Synthetic
uauuacauaaauaaauuaa

SEQ ID NO: 185 - RNA, 19 nt, Artificial Sequence
  Description of Artificial Sequence:  Synthetic
aauaaaauaaccccgggca

SEQ ID NO: 186 - RNA, 19 nt, Artificial Sequence
  Description of Artificial Sequence:  Synthetic
aagacuuuucuuugaagga

SEQ ID NO: 187 - RNA, 19 nt, Artificial Sequence
  Description of Artificial Sequence:  Synthetic
augacuacagacauuaaau

SEQ ID NO: 188 - RNA, 19 nt, Artificial Sequence
  Description of Artificial Sequence:  Synthetic
uaaucgaaguaauuuuggg

SEQ ID NO: 189 - RNA, 19 nt, Artificial Sequence
  Description of Artificial Sequence:  Synthetic
guggggagaagaggcagau

SEQ ID NO: 190 - RNA, 19 nt, Artificial Sequence
  Description of Artificial Sequence:  Synthetic
uucaauuuucuuuaaccag

SEQ ID NO: 191 - RNA, 19 nt, Artificial Sequence
  Description of Artificial Sequence:  Synthetic
gucugaaguuucauuuaug

SEQ ID NO: 192 - RNA, 19 nt, Artificial Sequence
  Description of Artificial Sequence:  Synthetic
gauacaaaagaagaugaaa

SEQ ID NO: 193 - RNA, 19 nt, Artificial Sequence
  Description of Artificial Sequence:  Synthetic
aauggaaguggcaauauaa

SEQ ID NO: 194 - RNA, 19 nt, Artificial Sequence
  Description of Artificial Sequence:  Synthetic
aggggaugaggaaggcaug

SEQ ID NO: 195 - RNA, 19 nt, Artificial Sequence
  Description of Artificial Sequence:  Synthetic
gccuggacaaacccuucuu

SEQ ID NO: 196 - RNA, 19 nt, Artificial Sequence
  Description of Artificial Sequence:  Synthetic
uuuaagaugugucuucaau

SEQ ID NO: 197 - RNA, 19 nt, Artificial Sequence
  Description of Artificial Sequence:  Synthetic
uuuguauaaaaugguguuu

SEQ ID NO: 198 - RNA, 19 nt, Artificial Sequence
  Description of Artificial Sequence:  Synthetic
uucauguaaauaaauacau

SEQ ID NO: 199 - RNA, 19 nt, Artificial Sequence
  Description of Artificial Sequence:  Synthetic
uaaauacauucuuggagga

SEQ ID NO: 200 - RNA, 19 nt, Artificial Sequence
  Description of Artificial Sequence:  Synthetic
ccuaccgcugccgaggaaa

SEQ ID NO: 201 - RNA, 19 nt, Artificial Sequence
  Description of Artificial Sequence:  Synthetic
cuccuccgcgugcucucgc

SEQ ID NO: 202 - RNA, 19 nt, Artificial Sequence
  Description of Artificial Sequence:  Synthetic
ccggggcccccgcgcacgc

SEQ ID NO: 203 - RNA, 19 nt, Artificial Sequence
  Description of Artificial Sequence:  Synthetic
cgccaccgccgccgucucc

SEQ ID NO: 204 - RNA, 19 nt, Artificial Sequence
  Description of Artificial Sequence:  Synthetic
uccuugcucugcccgcgcc

SEQ ID NO: 205 - RNA, 19 nt, Artificial Sequence
  Description of Artificial Sequence:  Synthetic
cgagugggauccgccgcgu

SEQ ID NO: 206 - RNA, 19 nt, Artificial Sequence
  Description of Artificial Sequence:  Synthetic
accgagugcgcugcugugc

SEQ ID NO: 207 - RNA, 19 nt, Artificial Sequence
  Description of Artificial Sequence:  Synthetic
cgcgacccugcgcggggca

SEQ ID NO: 208 - RNA, 19 nt, Artificial Sequence
  Description of Artificial Sequence:  Synthetic
ugccaaaccgggcagcauc

SEQ ID NO: 209 - RNA, 19 nt, Artificial Sequence
  Description of Artificial Sequence:  Synthetic
ggcggccagcaggagcagu

SEQ ID NO: 210 - RNA, 19 nt, Artificial Sequence
  Description of Artificial Sequence:  Synthetic
cagcgcccgagccguccag

SEQ ID NO: 211 - RNA, 19 nt, Artificial Sequence
  Description of Artificial Sequence:  Synthetic
accaucaguggguaccucc

SEQ ID NO: 212 - RNA, 19 nt, Artificial Sequence
  Description of Artificial Sequence:  Synthetic
agccagcaggccagcauua

SEQ ID NO: 213 - RNA, 19 nt, Artificial Sequence
  Description of Artificial Sequence:  Synthetic
cauggcaaucugggguuca

SEQ ID NO: 214 - RNA, 19 nt, Artificial Sequence
  Description of Artificial Sequence:  Synthetic
guucagucugccacagaac

SEQ ID NO: 215 - RNA, 19 nt, Artificial Sequence
  Description of Artificial Sequence:  Synthetic
cuggacauucaugugcaug

SEQ ID NO: 216 - RNA, 19 nt, Artificial Sequence
  Description of Artificial Sequence:  Synthetic
ugaaucccacuucccauuc

SEQ ID NO: 217 - RNA, 19 nt, Artificial Sequence
  Description of Artificial Sequence:  Synthetic
uuuggucccugauggaucu

SEQ ID NO: 218 - RNA, 19 nt, Artificial Sequence
  Description of Artificial Sequence:  Synthetic
cuugguaucaaugcagguu

SEQ ID NO: 219 - RNA, 19 nt, Artificial Sequence
  Description of Artificial Sequence:  Synthetic
auacugcaggaugccuucc

SEQ ID NO: 220 - RNA, 19 nt, Artificial Sequence
  Description of Artificial Sequence:  Synthetic
aggguagacuucuuggcaa

SEQ ID NO: 221 - RNA, 19 nt, Artificial Sequence
  Description of Artificial Sequence:  Synthetic
auuggugaucugcaguuca

SEQ ID NO: 222 - RNA, 19 nt, Artificial Sequence
  Description of Artificial Sequence:  Synthetic
uugguuggcuucuaccaca

SEQ ID NO: 223 - RNA, 19 nt, Artificial Sequence
  Description of Artificial Sequence:  Synthetic
guucuggauggucacuggu

SEQ ID NO: 224 - RNA, 19 nt, Artificial Sequence
  Description of Artificial Sequence:  Synthetic
gcggccccgcuugcaccag

SEQ ID NO: 225 - RNA, 19 nt, Artificial Sequence
  Description of Artificial Sequence:  Synthetic
augggucuugcacugcuug

SEQ ID NO: 226 - RNA, 19 nt, Artificial Sequence
  Description of Artificial Sequence:  Synthetic
gggaaucacaaagugggga

SEQ ID NO: 227 - RNA, 19 nt, Artificial Sequence
  Description of Artificial Sequence:  Synthetic
accaacuaagcagcgguag

SEQ ID NO: 228 - RNA, 19 nt, Artificial Sequence
  Description of Artificial Sequence:  Synthetic
ggcaucacuuacaaacuca

SEQ ID NO: 229 - RNA, 19 nt, Artificial Sequence
  Description of Artificial Sequence:  Synthetic
cuugucaggaacgagaagg

SEQ ID NO: 230 - RNA, 19 nt, Artificial Sequence
  Description of Artificial Sequence:  Synthetic
cugguguaagaauuugcac

SEQ ID NO: 231 - RNA, 19 nt, Artificial Sequence
  Description of Artificial Sequence:  Synthetic
gcaaacauccauccucucc

SEQ ID NO: 232 - RNA, 19 nt, Artificial Sequence
  Description of Artificial Sequence:  Synthetic
ccagugaagaugaguuucg

SEQ ID NO: 233 - RNA, 19 nt, Artificial Sequence
  Description of Artificial Sequence:  Synthetic
cucuuuggcgacggugugc

SEQ ID NO: 234 - RNA, 19 nt, Artificial Sequence
  Description of Artificial Sequence:  Synthetic
acucuucucacugcauguc

SEQ ID NO: 235 - RNA, 19 nt, Artificial Sequence
  Description of Artificial Sequence:  Synthetic
guagucaugcaaguuggua

SEQ ID NO: 236 - RNA, 19 nt, Artificial Sequence
  Description of Artificial Sequence:  Synthetic
gcagggcagcaacaugccg

SEQ ID NO: 237 - RNA, 19 nt, Artificial Sequence
  Description of Artificial Sequence:  Synthetic
ucggaacuugucaauuccg

SEQ ID NO: 238 - RNA, 19 nt, Artificial Sequence
  Description of Artificial Sequence:  Synthetic
acacacaaacucuaccccu

SEQ ID NO: 239 - RNA, 19 nt, Artificial Sequence
  Description of Artificial Sequence:  Synthetic
uucuucagccagugggcaa

SEQ ID NO: 240 - RNA, 19 nt, Artificial Sequence
  Description of Artificial Sequence:  Synthetic
agaauccacauugucacuu

SEQ ID NO: 241 - RNA, 19 nt, Artificial Sequence
  Description of Artificial Sequence:  Synthetic
auccuccuccgcaucagca

SEQ ID NO: 242 - RNA, 19 nt, Artificial Sequence
  Description of Artificial Sequence:  Synthetic
ccaccagacauccgaguca

SEQ ID NO: 243 - RNA, 19 nt, Artificial Sequence
  Description of Artificial Sequence:  Synthetic
gucugugucugcuccgccc

SEQ ID NO: 244 - RNA, 19 nt, Artificial Sequence
  Description of Artificial Sequence:  Synthetic
uucacucccaucugcauag

SEQ ID NO: 245 - RNA, 19 nt, Artificial Sequence
  Description of Artificial Sequence:  Synthetic
uacuucuacuacuuugucu

SEQ ID NO: 246 - RNA, 19 nt, Artificial Sequence
  Description of Artificial Sequence:  Synthetic
cacuucuuccuccucugcu

SEQ ID NO: 247 - RNA, 19 nt, Artificial Sequence
  Description of Artificial Sequence:  Synthetic
uucuucuuccaccucagcc

SEQ ID NO: 248 - RNA, 19 nt, Artificial Sequence
  Description of Artificial Sequence:  Synthetic
cucgucaucaucggcuucu

SEQ ID NO: 249 - RNA, 19 nt, Artificial Sequence
  Description of Artificial Sequence:  Synthetic
aucaccauccucaucgucc

SEQ ID NO: 250 - RNA, 19 nt, Artificial Sequence
  Description of Artificial Sequence:  Synthetic
agccucuuccucuaccuca

SEQ ID NO: 251 - RNA, 19 nt, Artificial Sequence
  Description of Artificial Sequence:  Synthetic
uucuucguaggguuccuca

SEQ ID NO: 252 - RNA, 19 nt, Artificial Sequence
  Description of Artificial Sequence:  Synthetic
ggugguucucucuguggcu

SEQ ID NO: 253 - RNA, 19 nt, Artificial Sequence
  Description of Artificial Sequence:  Synthetic
gguggugguggcaaugcug

SEQ ID NO: 254 - RNA, 19 nt, Artificial Sequence
  Description of Artificial Sequence:  Synthetic
agacucuguggugguggug

SEQ ID NO: 255 - RNA, 19 nt, Artificial Sequence
  Description of Artificial Sequence:  Synthetic
ucgaaccaccucuuccaca

SEQ ID NO: 256 - RNA, 19 nt, Artificial Sequence
  Description of Artificial Sequence:  Synthetic
uuguucagagcacaccucu

SEQ ID NO: 257 - RNA, 19 nt, Artificial Sequence
  Description of Artificial Sequence:  Synthetic
gcacggccccgucucggcu

SEQ ID NO: 258 - RNA, 19 nt, Artificial Sequence
  Description of Artificial Sequence:  Synthetic
gcgggagaucauugcucgg

SEQ ID NO: 259 - RNA, 19 nt, Artificial Sequence
  Description of Artificial Sequence:  Synthetic
agucacaucaaaguaccag

SEQ ID NO: 260 - RNA, 19 nt, Artificial Sequence
  Description of Artificial Sequence:  Synthetic
uggggcacacuucccuuca

SEQ ID NO: 261 - RNA, 19 nt, Artificial Sequence
  Description of Artificial Sequence:  Synthetic
acauccgccguaaaagaau

SEQ ID NO: 262 - RNA, 19 nt, Artificial Sequence
  Description of Artificial Sequence:  Synthetic
guuguuccgguugccgcca

SEQ ID NO: 263 - RNA, 19 nt, Artificial Sequence
  Description of Artificial Sequence:  Synthetic
guacucuucugugucaaag

SEQ ID NO: 264 - RNA, 19 nt, Artificial Sequence
  Description of Artificial Sequence:  Synthetic
gccacacacggccaugcag

SEQ ID NO: 265 - RNA, 19 nt, Artificial Sequence
  Description of Artificial Sequence:  Synthetic
acuuugggacauggcgcug

SEQ ID NO: 266 - RNA, 19 nt, Artificial Sequence
  Description of Artificial Sequence:  Synthetic
cuggguagucuugaguaaa

SEQ ID NO: 267 - RNA, 19 nt, Artificial Sequence
  Description of Artificial Sequence:  Synthetic
aucucgggcaagagguucc

SEQ ID NO: 268 - RNA, 19 nt, Artificial Sequence
  Description of Artificial Sequence:  Synthetic
uguaggaaguuuaacagga

SEQ ID NO: 269 - RNA, 19 nt, Artificial Sequence
  Description of Artificial Sequence:  Synthetic
agggguacuggcugcuguu

SEQ ID NO: 270 - RNA, 19 nt, Artificial Sequence
  Description of Artificial Sequence:  Synthetic
auacuugucaacggcauca

SEQ ID NO: 271 - RNA, 19 nt, Artificial Sequence
  Description of Artificial Sequence:  Synthetic
auccccaggugucucgaga

SEQ ID NO: 272 - RNA, 19 nt, Artificial Sequence
  Description of Artificial Sequence:  Synthetic
augggcauguucauucuca

SEQ ID NO: 273 - RNA, 19 nt, Artificial Sequence
  Description of Artificial Sequence:  Synthetic
cucuuuggcuuucuggaaa

SEQ ID NO: 274 - RNA, 19 nt, Artificial Sequence
  Description of Artificial Sequence:  Synthetic
gugcuuggccucaagccuc

SEQ ID NO: 275 - RNA, 19 nt, Artificial Sequence
  Description of Artificial Sequence:  Synthetic
cugggacauucucucucgg

SEQ ID NO: 276 - RNA, 19 nt, Artificial Sequence
  Description of Artificial Sequence:  Synthetic
uucccauucucucaugacc

SEQ ID NO: 277 - RNA, 19 nt, Artificial Sequence
  Description of Artificial Sequence:  Synthetic
ugcuugacguucugccucu

SEQ ID NO: 278 - RNA, 19 nt, Artificial Sequence
  Description of Artificial Sequence:  Synthetic
agcuuuaggcaaguucuuu

SEQ ID NO: 279 - RNA, 19 nt, Artificial Sequence
  Description of Artificial Sequence:  Synthetic
gauaacugccuucuuauca

SEQ ID NO: 280 - RNA, 19 nt, Artificial Sequence
  Description of Artificial Sequence:  Synthetic
uuucuccuggaaaugcugg

SEQ ID NO: 281 - RNA, 19 nt, Artificial Sequence
  Description of Artificial Sequence:  Synthetic
cuguuccaaagauuccacu

SEQ ID NO: 282 - RNA, 19 nt, Artificial Sequence
  Description of Artificial Sequence:  Synthetic
ucucucguuggcugcuucc

SEQ ID NO: 283 - RNA, 19 nt, Artificial Sequence
  Description of Artificial Sequence:  Synthetic
ugucuccaccagcugcugu

SEQ ID NO: 284 - RNA, 19 nt, Artificial Sequence
  Description of Artificial Sequence:  Synthetic
uuccacucuggccaugugu

SEQ ID NO: 285 - RNA, 19 nt, Artificial Sequence
  Description of Artificial Sequence:  Synthetic
gcggucauugagcauggcu

SEQ ID NO: 286 - RNA, 19 nt, Artificial Sequence
  Description of Artificial Sequence:  Synthetic
cuccagggccaggcggcgg

SEQ ID NO: 287 - RNA, 19 nt, Artificial Sequence
  Description of Artificial Sequence:  Synthetic
cagagcggugauguaguuc

SEQ ID NO: 288 - RNA, 19 nt, Artificial Sequence
  Description of Artificial Sequence:  Synthetic
ccgaggaggaacagccugc

SEQ ID NO: 289 - RNA, 19 nt, Artificial Sequence
  Description of Artificial Sequence:  Synthetic
auugaacacgugacgaggc

SEQ ID NO: 290 - RNA, 19 nt, Artificial Sequence
  Description of Artificial Sequence:  Synthetic
gacauacuucuuuagcaua

SEQ ID NO: 291 - RNA, 19 nt, Artificial Sequence
  Description of Artificial Sequence:  Synthetic
guccuucuguucugcgcgg

SEQ ID NO: 292 - RNA, 19 nt, Artificial Sequence
  Description of Artificial Sequence:  Synthetic
cuuuagggugugcugucug

SEQ ID NO: 293 - RNA, 19 nt, Artificial Sequence
  Description of Artificial Sequence:  Synthetic
gcgcacaugcucgaaaugc

SEQ ID NO: 294 - RNA, 19 nt, Artificial Sequence
  Description of Artificial Sequence:  Synthetic
uuucuugggauccaccaug

SEQ ID NO: 295 - RNA, 19 nt, Artificial Sequence
  Description of Artificial Sequence:  Synthetic
ggaccggaucugagcggcu

SEQ ID NO: 296 - RNA, 19 nt, Artificial Sequence
  Description of Artificial Sequence:  Synthetic
gaggugugucauaaccugg

SEQ ID NO: 297 - RNA, 19 nt, Artificial Sequence
  Description of Artificial Sequence:  Synthetic
gcgcucauaaaucacacgg

SEQ ID NO: 298 - RNA, 19 nt, Artificial Sequence
  Description of Artificial Sequence:  Synthetic
ggagagagacugauucaug

SEQ ID NO: 299 - RNA, 19 nt, Artificial Sequence
  Description of Artificial Sequence:  Synthetic
aggcacguuguagagcagg

SEQ ID NO: 300 - RNA, 19 nt, Artificial Sequence
  Description of Artificial Sequence:  Synthetic
aaucuccucggccacugca

SEQ ID NO: 301 - RNA, 19 nt, Artificial Sequence
  Description of Artificial Sequence:  Synthetic
cucaucaacuucauccuga

SEQ ID NO: 302 - RNA, 19 nt, Artificial Sequence
  Description of Artificial Sequence:  Synthetic
uugcucuuucugaagcagc

SEQ ID NO: 303 - RNA, 19 nt, Artificial Sequence
  Description of Artificial Sequence:  Synthetic
gacgucaucugaauaguuu

SEQ ID NO: 304 - RNA, 19 nt, Artificial Sequence
  Description of Artificial Sequence:  Synthetic
acuaaucauguuggccaag

SEQ ID NO: 305 - RNA, 19 nt, Artificial Sequence
  Description of Artificial Sequence:  Synthetic
guaacugauccuugguuca

SEQ ID NO: 306 - RNA, 19 nt, Artificial Sequence
  Description of Artificial Sequence:  Synthetic
caugagagcaucguuuccg

SEQ ID NO: 307 - RNA, 19 nt, Artificial Sequence
  Description of Artificial Sequence:  Synthetic
cguuucggucaaagauggc

SEQ ID NO: 308 - RNA, 19 nt, Artificial Sequence
  Description of Artificial Sequence:  Synthetic
gagcuccacggugguuuuc

SEQ ID NO: 309 - RNA, 19 nt, Artificial Sequence
  Description of Artificial Sequence:  Synthetic
cucuccauucacgggaagg

SEQ ID NO: 310 - RNA, 19 nt, Artificial Sequence
  Description of Artificial Sequence:  Synthetic
gagaucguccaggcugaac

SEQ ID NO: 311 - RNA, 19 nt, Artificial Sequence
  Description of Artificial Sequence:  Synthetic
aaaagaaugccacggcugg

SEQ ID NO: 312 - RNA, 19 nt, Artificial Sequence
  Description of Artificial Sequence:  Synthetic
uggcacagagucagcccca

SEQ ID NO: 313 - RNA, 19 nt, Artificial Sequence
  Description of Artificial Sequence:  Synthetic
uucguuuucuguguuggcu

SEQ ID NO: 314 - RNA, 19 nt, Artificial Sequence
  Description of Artificial Sequence:  Synthetic
ggcaucaacaggcucaacu

SEQ ID NO: 315 - RNA, 19 nt, Artificial Sequence
  Description of Artificial Sequence:  Synthetic
ucggucggcagcagggcgg

SEQ ID NO: 316 - RNA, 19 nt, Artificial Sequence
  Description of Artificial Sequence:  Synthetic
uggucgaguggucaguccu

SEQ ID NO: 317 - RNA, 19 nt, Artificial Sequence
  Description of Artificial Sequence:  Synthetic
auuugucaacccagaaccu

SEQ ID NO: 318 - RNA, 19 nt, Artificial Sequence
  Description of Artificial Sequence:  Synthetic
gaucuccuccgucuugaua

SEQ ID NO: 319 - RNA, 19 nt, Artificial Sequence
  Description of Artificial Sequence:  Synthetic
auccaucuucacuucagag

SEQ ID NO: 320 - RNA, 19 nt, Artificial Sequence
  Description of Artificial Sequence:  Synthetic
gucaugucggaauucugca

SEQ ID NO: 321 - RNA, 19 nt, Artificial Sequence
  Description of Artificial Sequence:  Synthetic
augaacuucauauccugag

SEQ ID NO: 322 - RNA, 19 nt, Artificial Sequence
  Description of Artificial Sequence:  Synthetic
gaacaccaauuuuugauga

SEQ ID NO: 323 - RNA, 19 nt, Artificial Sequence
  Description of Artificial Sequence:  Synthetic
acccacaucuucugcaaag

SEQ ID NO: 324 - RNA, 19 nt, Artificial Sequence
  Description of Artificial Sequence:  Synthetic
gauugcaccuuuguuugaa

SEQ ID NO: 325 - RNA, 19 nt, Artificial Sequence
  Description of Artificial Sequence:  Synthetic
gcccaccaugaguccaaug

SEQ ID NO: 326 - RNA, 19 nt, Artificial Sequence
  Description of Artificial Sequence:  Synthetic
ugucgcuaugacaacaccg

SEQ ID NO: 327 - RNA, 19 nt, Artificial Sequence
  Description of Artificial Sequence:  Synthetic
caaggugaugacgaucacu

SEQ ID NO: 328 - RNA, 19 nt, Artificial Sequence
  Description of Artificial Sequence:  Synthetic
uuucuucuucagcaucacc

SEQ ID NO: 329 - RNA, 19 nt, Artificial Sequence
  Description of Artificial Sequence:  Synthetic
augaauggauguguacugu

SEQ ID NO: 330 - RNA, 19 nt, Artificial Sequence
  Description of Artificial Sequence:  Synthetic
aaccuccaccacaccauga

SEQ ID NO: 331 - RNA, 19 nt, Artificial Sequence
  Description of Artificial Sequence:  Synthetic
uggggugacagcggcguca

SEQ ID NO: 332 - RNA, 19 nt, Artificial Sequence
  Description of Artificial Sequence:  Synthetic
ggacagguggcgcuccucu

SEQ ID NO: 333 - RNA, 19 nt, Artificial Sequence
  Description of Artificial Sequence:  Synthetic
gccguucugcugcaucuug

SEQ ID NO: 334 - RNA, 19 nt, Artificial Sequence
  Description of Artificial Sequence:  Synthetic
guagguuggauuuucguag

SEQ ID NO: 335 - RNA, 19 nt, Artificial Sequence
  Description of Artificial Sequence:  Synthetic
caucugcucaaagaacuug

SEQ ID NO: 336 - RNA, 19 nt, Artificial Sequence
  Description of Artificial Sequence:  Synthetic
ggcgggggucuaguucugc

SEQ ID NO: 337 - RNA, 19 nt, Artificial Sequence
  Description of Artificial Sequence:  Synthetic
aacuucagaggcugcugug

SEQ ID NO: 338 - RNA, 19 nt, Artificial Sequence
  Description of Artificial Sequence:  Synthetic
gcaaugguuuugcugucca

SEQ ID NO: 339 - RNA, 19 nt, Artificial Sequence
  Description of Artificial Sequence:  Synthetic
acaccgauggguagugaag

SEQ ID NO: 340 - RNA, 19 nt, Artificial Sequence
  Description of Artificial Sequence:  Synthetic
acauuauucuauaaaugga

SEQ ID NO: 341 - RNA, 19 nt, Artificial Sequence
  Description of Artificial Sequence:  Synthetic
acggguuuguuucuuccca

SEQ ID NO: 342 - RNA, 19 nt, Artificial Sequence
  Description of Artificial Sequence:  Synthetic
uaaugaguaaaucauaaaa

SEQ ID NO: 343 - RNA, 19 nt, Artificial Sequence
  Description of Artificial Sequence:  Synthetic
acagcugucaaaaggcgau

SEQ ID NO: 344 - RNA, 19 nt, Artificial Sequence
  Description of Artificial Sequence:  Synthetic
aucuacuuguguuacagca

SEQ ID NO: 345 - RNA, 19 nt, Artificial Sequence
  Description of Artificial Sequence:  Synthetic
auuaauucaaguucaggca

SEQ ID NO: 346 - RNA, 19 nt, Artificial Sequence
  Description of Artificial Sequence:  Synthetic
uacauuacugaugugugga

SEQ ID NO: 347 - RNA, 19 nt, Artificial Sequence
  Description of Artificial Sequence:  Synthetic
auguaaagagagauagaau

SEQ ID NO: 348 - RNA, 19 nt, Artificial Sequence
  Description of Artificial Sequence:  Synthetic
uguaguauagagaccaaaa

SEQ ID NO: 349 - RNA, 19 nt, Artificial Sequence
  Description of Artificial Sequence:  Synthetic
cacaaaacccauuaauaau

SEQ ID NO: 350 - RNA, 19 nt, Artificial Sequence
  Description of Artificial Sequence:  Synthetic
gcuaaauucuuuacaguac

SEQ ID NO: 351 - RNA, 19 nt, Artificial Sequence
  Description of Artificial Sequence:  Synthetic
augcacuaguuugauacag

SEQ ID NO: 352 - RNA, 19 nt, Artificial Sequence
  Description of Artificial Sequence:  Synthetic
ucaggagagaaucuauuca

SEQ ID NO: 353 - RNA, 19 nt, Artificial Sequence
  Description of Artificial Sequence:  Synthetic
gggcuaugugauaaauaau

SEQ ID NO: 354 - RNA, 19 nt, Artificial Sequence
  Description of Artificial Sequence:  Synthetic
aauauacaacuggcuaagg

SEQ ID NO: 355 - RNA, 19 nt, Artificial Sequence
  Description of Artificial Sequence:  Synthetic
gucacaaaccacaagaaua

SEQ ID NO: 356 - RNA, 19 nt, Artificial Sequence
  Description of Artificial Sequence:  Synthetic
aaaguaggacuuaauuggg

SEQ ID NO: 357 - RNA, 19 nt, Artificial Sequence
  Description of Artificial Sequence:  Synthetic
gauucuuaaagcauaugua

SEQ ID NO: 358 - RNA, 19 nt, Artificial Sequence
  Description of Artificial Sequence:  Synthetic
caugaagcaucccccaucg

SEQ ID NO: 359 - RNA, 19 nt, Artificial Sequence
  Description of Artificial Sequence:  Synthetic
gcugaacucccacguucac

SEQ ID NO: 360 - RNA, 19 nt, Artificial Sequence
  Description of Artificial Sequence:  Synthetic
acuuaggcaagagaagcag

SEQ ID NO: 361 - RNA, 19 nt, Artificial Sequence
  Description of Artificial Sequence:  Synthetic
agugaucaggaaaggaaua

SEQ ID NO: 362 - RNA, 19 nt, Artificial Sequence
  Description of Artificial Sequence:  Synthetic
uuuaacuuuaaaaugcaua

SEQ ID NO: 363 - RNA, 19 nt, Artificial Sequence
  Description of Artificial Sequence:  Synthetic
cugaaauacuuaaaaaugu

SEQ ID NO: 364 - RNA, 19 nt, Artificial Sequence
  Description of Artificial Sequence:  Synthetic
aaaaucucucuaaagcauc

SEQ ID NO: 365 - RNA, 19 nt, Artificial Sequence
  Description of Artificial Sequence:  Synthetic
aaaugcagucauggaaaaa

SEQ ID NO: 366 - RNA, 19 nt, Artificial Sequence
  Description of Artificial Sequence:  Synthetic
gcagcaaucuguacaguaa

SEQ ID NO: 367 - RNA, 19 nt, Artificial Sequence
  Description of Artificial Sequence:  Synthetic
aucacaaauauagcagaag

SEQ ID NO: 368 - RNA, 19 nt, Artificial Sequence
  Description of Artificial Sequence:  Synthetic
uauccucuuaauuccuaua

SEQ ID NO: 369 - RNA, 19 nt, Artificial Sequence
  Description of Artificial Sequence:  Synthetic
cgaagaaacaaacgugugu

SEQ ID NO: 370 - RNA, 19 nt, Artificial Sequence
  Description of Artificial Sequence:  Synthetic
gugcacauaaaacaggcac

SEQ ID NO: 371 - RNA, 19 nt, Artificial Sequence
  Description of Artificial Sequence:  Synthetic
agucucaaugccuaaugug

SEQ ID NO: 372 - RNA, 19 nt, Artificial Sequence
  Description of Artificial Sequence:  Synthetic
aaaaaaagaaaagcuugaa

SEQ ID NO: 373 - RNA, 19 nt, Artificial Sequence
  Description of Artificial Sequence:  Synthetic
acccaaagauacguggaca

SEQ ID NO: 374 - RNA, 19 nt, Artificial Sequence
  Description of Artificial Sequence:  Synthetic
uucuuuucuuuaucaaaga

SEQ ID NO: 375 - RNA, 19 nt, Artificial Sequence
  Description of Artificial Sequence:  Synthetic
gcuuacaaugaacagggau

SEQ ID NO: 376 - RNA, 19 nt, Artificial Sequence
  Description of Artificial Sequence:  Synthetic
cacccgccccguaaaagug

SEQ ID NO: 377 - RNA, 19 nt, Artificial Sequence
  Description of Artificial Sequence:  Synthetic
cagcagagcaccccucccc

SEQ ID NO: 378 - RNA, 19 nt, Artificial Sequence
  Description of Artificial Sequence:  Synthetic
uucuugguaauugaagacc

SEQ ID NO: 379 - RNA, 19 nt, Artificial Sequence
  Description of Artificial Sequence:  Synthetic
gaaaauuguuuuggagaau

SEQ ID NO: 380 - RNA, 19 nt, Artificial Sequence
  Description of Artificial Sequence:  Synthetic
cuguacaaucauccugcag

SEQ ID NO: 381 - RNA, 19 nt, Artificial Sequence
  Description of Artificial Sequence:  Synthetic
augucauaagcaaugauuc

SEQ ID NO: 382 - RNA, 19 nt, Artificial Sequence
  Description of Artificial Sequence:  Synthetic
acaguguagaaagcgauca

SEQ ID NO: 383 - RNA, 19 nt, Artificial Sequence
  Description of Artificial Sequence:  Synthetic
uuaauuuauuuauguaaua

SEQ ID NO: 384 - RNA, 19 nt, Artificial Sequence
  Description of Artificial Sequence:  Synthetic
ugcccgggguuauuuuauu

SEQ ID NO: 385 - RNA, 19 nt, Artificial Sequence
  Description of Artificial Sequence:  Synthetic
uccuucaaagaaaagucuu

SEQ ID NO: 386 - RNA, 19 nt, Artificial Sequence
  Description of Artificial Sequence:  Synthetic
auuuaaugucuguagucau

SEQ ID NO: 387 - RNA, 19 nt, Artificial Sequence
  Description of Artificial Sequence:  Synthetic
cccaaaauuacuucgauua

SEQ ID NO: 388 - RNA, 19 nt, Artificial Sequence
  Description of Artificial Sequence:  Synthetic
aucugccucuucuccccac

SEQ ID NO: 389 - RNA, 19 nt, Artificial Sequence
  Description of Artificial Sequence:  Synthetic
cugguuaaagaaaauugaa

SEQ ID NO: 390 - RNA, 19 nt, Artificial Sequence
  Description of Artificial Sequence:  Synthetic
cauaaaugaaacuucagac

SEQ ID NO: 391 - RNA, 19 nt, Artificial Sequence
  Description of Artificial Sequence:  Synthetic
uuucaucuucuuuuguauc

SEQ ID NO: 392 - RNA, 19 nt, Artificial Sequence
  Description of Artificial Sequence:  Synthetic
uuauauugccacuuccauu

SEQ ID NO: 393 - RNA, 19 nt, Artificial Sequence
  Description of Artificial Sequence:  Synthetic
caugccuuccucauccccu

SEQ ID NO: 394 - RNA, 19 nt, Artificial Sequence
  Description of Artificial Sequence:  Synthetic
aagaaggguuuguccaggc

SEQ ID NO: 395 - RNA, 19 nt, Artificial Sequence
  Description of Artificial Sequence:  Synthetic
auugaagacacaucuuaaa

SEQ ID NO: 396 - RNA, 19 nt, Artificial Sequence
  Description of Artificial Sequence:  Synthetic
aaacaccauuuuauacaaa

SEQ ID NO: 397 - RNA, 19 nt, Artificial Sequence
  Description of Artificial Sequence:  Synthetic
auguauuuauuuacaugaa

SEQ ID NO: 398 - RNA, 19 nt, Artificial Sequence
  Description of Artificial Sequence:  Synthetic
uccuccaagaauguauuua

SEQ ID NO: 399 - RNA, 19 nt, Artificial Sequence
  Description of Artificial Sequence:  Synthetic
cgcacucguccccagcccg

SEQ ID NO: 400 - RNA, 19 nt, Artificial Sequence
  Description of Artificial Sequence:  Synthetic
gcccgggagcugcgagccg

SEQ ID NO: 401 - RNA, 19 nt, Artificial Sequence
  Description of Artificial Sequence:  Synthetic
gcgagcuggauuauggugg

SEQ ID NO: 402 - RNA, 19 nt, Artificial Sequence
  Description of Artificial Sequence:  Synthetic
gccugagcagccaacgcag

SEQ ID NO: 403 - RNA, 19 nt, Artificial Sequence
  Description of Artificial Sequence:  Synthetic
gccgcaggagcccggagcc

SEQ ID NO: 404 - RNA, 19 nt, Artificial Sequence
  Description of Artificial Sequence:  Synthetic
ccuugccccugcccgcgcc

SEQ ID NO: 405 - RNA, 19 nt, Artificial Sequence
  Description of Artificial Sequence:  Synthetic
cgccgcccgccggggggac

SEQ ID NO: 406 - RNA, 19 nt, Artificial Sequence
  Description of Artificial Sequence:  Synthetic
ccagggaagccgccaccgg

SEQ ID NO: 407 - RNA, 19 nt, Artificial Sequence
  Description of Artificial Sequence:  Synthetic
gcccgccaugcccgccccu

SEQ ID NO: 408 - RNA, 19 nt, Artificial Sequence
  Description of Artificial Sequence:  Synthetic
ucccagccccgccgggagc

SEQ ID NO: 409 - RNA, 19 nt, Artificial Sequence
  Description of Artificial Sequence:  Synthetic
cccgcgcccgcugcccagg

SEQ ID NO: 410 - RNA, 19 nt, Artificial Sequence
  Description of Artificial Sequence:  Synthetic
gcuggccgccgccgugccg

SEQ ID NO: 411 - RNA, 19 nt, Artificial Sequence
  Description of Artificial Sequence:  Synthetic
gauguagcgggcuccggau

SEQ ID NO: 412 - RNA, 19 nt, Artificial Sequence
  Description of Artificial Sequence:  Synthetic
ucccagccucuccccugcu

SEQ ID NO: 413 - RNA, 19 nt, Artificial Sequence
  Description of Artificial Sequence:  Synthetic
ucccgugcucugcggaucu

SEQ ID NO: 414 - RNA, 19 nt, Artificial Sequence
  Description of Artificial Sequence:  Synthetic
uccccugaccgcucuccac

SEQ ID NO: 415 - RNA, 19 nt, Artificial Sequence
  Description of Artificial Sequence:  Synthetic
cagcccggacccgggggcu

SEQ ID NO: 416 - RNA, 19 nt, Artificial Sequence
  Description of Artificial Sequence:  Synthetic
uggcccagggcccugcagg

SEQ ID NO: 417 - RNA, 19 nt, Artificial Sequence
  Description of Artificial Sequence:  Synthetic
gcccuggcguccugaugcc

SEQ ID NO: 418 - RNA, 19 nt, Artificial Sequence
  Description of Artificial Sequence:  Synthetic
ccccaagcucccucuccug

SEQ ID NO: 419 - RNA, 19 nt, Artificial Sequence
  Description of Artificial Sequence:  Synthetic
gagaagccaccagcaccac

SEQ ID NO: 420 - RNA, 19 nt, Artificial Sequence
  Description of Artificial Sequence:  Synthetic
cccagacuugggggcaggc

SEQ ID NO: 421 - RNA, 19 nt, Artificial Sequence
  Description of Artificial Sequence:  Synthetic
cgccagggacggacguggg

SEQ ID NO: 422 - RNA, 19 nt, Artificial Sequence
  Description of Artificial Sequence:  Synthetic
gccagugcgagcccagagg

SEQ ID NO: 423 - RNA, 19 nt, Artificial Sequence
  Description of Artificial Sequence:  Synthetic
ggcccgaaggccggggccc

SEQ ID NO: 424 - RNA, 19 nt, Artificial Sequence
  Description of Artificial Sequence:  Synthetic
caccauggcccaagcccug

SEQ ID NO: 425 - RNA, 19 nt, Artificial Sequence
  Description of Artificial Sequence:  Synthetic
gcccuggcuccugcugugg

SEQ ID NO: 426 - RNA, 19 nt, Artificial Sequence
  Description of Artificial Sequence:  Synthetic
gaugggcgcgggagugcug

SEQ ID NO: 427 - RNA, 19 nt, Artificial Sequence
  Description of Artificial Sequence:  Synthetic
gccugcccacggcacccag

SEQ ID NO: 428 - RNA, 19 nt, Artificial Sequence
  Description of Artificial Sequence:  Synthetic
gcacggcauccggcugccc

SEQ ID NO: 429 - RNA, 19 nt, Artificial Sequence
  Description of Artificial Sequence:  Synthetic
ccugcgcagcggccugggg

SEQ ID NO: 430 - RNA, 19 nt, Artificial Sequence
  Description of Artificial Sequence:  Synthetic
gggcgccccccuggggcug

SEQ ID NO: 431 - RNA, 19 nt, Artificial Sequence
  Description of Artificial Sequence:  Synthetic
gcggcugccccgggagacc

SEQ ID NO: 432 - RNA, 19 nt, Artificial Sequence
  Description of Artificial Sequence:  Synthetic
cgacgaagagcccgaggag

SEQ ID NO: 433 - RNA, 19 nt, Artificial Sequence
  Description of Artificial Sequence:  Synthetic
gcccggccggaggggcagc

SEQ ID NO: 434 - RNA, 19 nt, Artificial Sequence
  Description of Artificial Sequence:  Synthetic
cuuuguggagaugguggac

SEQ ID NO: 435 - RNA, 19 nt, Artificial Sequence
  Description of Artificial Sequence:  Synthetic
caaccugaggggcaagucg

SEQ ID NO: 436 - RNA, 19 nt, Artificial Sequence
  Description of Artificial Sequence:  Synthetic
ggggcagggcuacuacgug

SEQ ID NO: 437 - RNA, 19 nt, Artificial Sequence
  Description of Artificial Sequence:  Synthetic
ggagaugaccgugggcagc

SEQ ID NO: 438 - RNA, 19 nt, Artificial Sequence
  Description of Artificial Sequence:  Synthetic
ccccccgcagacgcucaac

SEQ ID NO: 439 - RNA, 19 nt, Artificial Sequence
  Description of Artificial Sequence:  Synthetic
cauccugguggauacaggc

SEQ ID NO: 440 - RNA, 19 nt, Artificial Sequence
  Description of Artificial Sequence:  Synthetic
cagcaguaacuuugcagug

SEQ ID NO: 441 - RNA, 19 nt, Artificial Sequence
  Description of Artificial Sequence:  Synthetic
gggugcugccccccacccc

SEQ ID NO: 442 - RNA, 19 nt, Artificial Sequence
  Description of Artificial Sequence:  Synthetic
cuuccugcaucgcuacuac

SEQ ID NO: 443 - RNA, 19 nt, Artificial Sequence
  Description of Artificial Sequence:  Synthetic
ccagaggcagcuguccagc

SEQ ID NO: 444 - RNA, 19 nt, Artificial Sequence
  Description of Artificial Sequence:  Synthetic
cacauaccgggaccuccgg

SEQ ID NO: 445 - RNA, 19 nt, Artificial Sequence
  Description of Artificial Sequence:  Synthetic
gaaggguguguaugugccc

SEQ ID NO: 446 - RNA, 19 nt, Artificial Sequence
  Description of Artificial Sequence:  Synthetic
cuacacccagggcaagugg

SEQ ID NO: 447 - RNA, 19 nt, Artificial Sequence
  Description of Artificial Sequence:  Synthetic
ggaaggggagcugggcacc

SEQ ID NO: 448 - RNA, 19 nt, Artificial Sequence
  Description of Artificial Sequence:  Synthetic
cgaccugguaagcaucccc

SEQ ID NO: 449 - RNA, 19 nt, Artificial Sequence
  Description of Artificial Sequence:  Synthetic
ccauggccccaacgucacu

SEQ ID NO: 450 - RNA, 19 nt, Artificial Sequence
  Description of Artificial Sequence:  Synthetic
ugugcgugccaacauugcu

SEQ ID NO: 451 - RNA, 19 nt, Artificial Sequence
  Description of Artificial Sequence:  Synthetic
ugccaucacugaaucagac

SEQ ID NO: 452 - RNA, 19 nt, Artificial Sequence
  Description of Artificial Sequence:  Synthetic
caaguucuucaucaacggc

SEQ ID NO: 453 - RNA, 19 nt, Artificial Sequence
  Description of Artificial Sequence:  Synthetic
cuccaacugggaaggcauc

SEQ ID NO: 454 - RNA, 19 nt, Artificial Sequence
  Description of Artificial Sequence:  Synthetic
ccuggggcuggccuaugcu

SEQ ID NO: 455 - RNA, 19 nt, Artificial Sequence
  Description of Artificial Sequence:  Synthetic
ugagauugccaggccugac

SEQ ID NO: 456 - RNA, 19 nt, Artificial Sequence
  Description of Artificial Sequence:  Synthetic
cgacucccuggagccuuuc

SEQ ID NO: 457 - RNA, 19 nt, Artificial Sequence
  Description of Artificial Sequence:  Synthetic
cuuugacucucugguaaag

SEQ ID NO: 458 - RNA, 19 nt, Artificial Sequence
  Description of Artificial Sequence:  Synthetic
gcagacccacguucccaac

SEQ ID NO: 459 - RNA, 19 nt, Artificial Sequence
  Description of Artificial Sequence:  Synthetic
ccucuucucccugcagcuu

SEQ ID NO: 460 - RNA, 19 nt, Artificial Sequence
  Description of Artificial Sequence:  Synthetic
uuguggugcuggcuucccc

SEQ ID NO: 461 - RNA, 19 nt, Artificial Sequence
  Description of Artificial Sequence:  Synthetic
ccucaaccagucugaagug

SEQ ID NO: 462 - RNA, 19 nt, Artificial Sequence
  Description of Artificial Sequence:  Synthetic
gcuggccucugucggaggg

SEQ ID NO: 463 - RNA, 19 nt, Artificial Sequence
  Description of Artificial Sequence:  Synthetic
gagcaugaucauuggaggu

SEQ ID NO: 464 - RNA, 19 nt, Artificial Sequence
  Description of Artificial Sequence:  Synthetic
uaucgaccacucgcuguac

SEQ ID NO: 465 - RNA, 19 nt, Artificial Sequence
  Description of Artificial Sequence:  Synthetic
cacaggcagucucugguau

SEQ ID NO: 466 - RNA, 19 nt, Artificial Sequence
  Description of Artificial Sequence:  Synthetic
uacacccauccggcgggag

SEQ ID NO: 467 - RNA, 19 nt, Artificial Sequence
  Description of Artificial Sequence:  Synthetic
gugguauuaugaggucauc

SEQ ID NO: 468 - RNA, 19 nt, Artificial Sequence
  Description of Artificial Sequence:  Synthetic
cauugugcggguggagauc

SEQ ID NO: 469 - RNA, 19 nt, Artificial Sequence
  Description of Artificial Sequence:  Synthetic
caauggacaggaucugaaa

SEQ ID NO: 470 - RNA, 19 nt, Artificial Sequence
  Description of Artificial Sequence:  Synthetic
aauggacugcaaggaguac

SEQ ID NO: 471 - RNA, 19 nt, Artificial Sequence
  Description of Artificial Sequence:  Synthetic
caacuaugacaagagcauu

SEQ ID NO: 472 - RNA, 19 nt, Artificial Sequence
  Description of Artificial Sequence:  Synthetic
uguggacaguggcaccacc

SEQ ID NO: 473 - RNA, 19 nt, Artificial Sequence
  Description of Artificial Sequence:  Synthetic
caaccuucguuugcccaag

SEQ ID NO: 474 - RNA, 19 nt, Artificial Sequence
  Description of Artificial Sequence:  Synthetic
gaaaguguuugaagcugca

SEQ ID NO: 475 - RNA, 19 nt, Artificial Sequence
  Description of Artificial Sequence:  Synthetic
agucaaauccaucaaggca

SEQ ID NO: 476 - RNA, 19 nt, Artificial Sequence
  Description of Artificial Sequence:  Synthetic
agccuccuccacggagaag

SEQ ID NO: 477 - RNA, 19 nt, Artificial Sequence
  Description of Artificial Sequence:  Synthetic
guucccugaugguuucugg

SEQ ID NO: 478 - RNA, 19 nt, Artificial Sequence
  Description of Artificial Sequence:  Synthetic
gcuaggagagcagcuggug

SEQ ID NO: 479 - RNA, 19 nt, Artificial Sequence
  Description of Artificial Sequence:  Synthetic
gugcuggcaagcaggcacc

SEQ ID NO: 480 - RNA, 19 nt, Artificial Sequence
  Description of Artificial Sequence:  Synthetic
caccccuuggaacauuuuc

SEQ ID NO: 481 - RNA, 19 nt, Artificial Sequence
  Description of Artificial Sequence:  Synthetic
cccagucaucucacucuac

SEQ ID NO: 482 - RNA, 19 nt, Artificial Sequence
  Description of Artificial Sequence:  Synthetic
ccuaaugggugagguuacc

SEQ ID NO: 483 - RNA, 19 nt, Artificial Sequence
  Description of Artificial Sequence:  Synthetic
caaccaguccuuccgcauc

SEQ ID NO: 484 - RNA, 19 nt, Artificial Sequence
  Description of Artificial Sequence:  Synthetic
caccauccuuccgcagcaa

SEQ ID NO: 485 - RNA, 19 nt, Artificial Sequence
  Description of Artificial Sequence:  Synthetic
auaccugcggccaguggaa

SEQ ID NO: 486 - RNA, 19 nt, Artificial Sequence
  Description of Artificial Sequence:  Synthetic
agauguggccacgucccaa

SEQ ID NO: 487 - RNA, 19 nt, Artificial Sequence
  Description of Artificial Sequence:  Synthetic
agacgacuguuacaaguuu

SEQ ID NO: 488 - RNA, 19 nt, Artificial Sequence
  Description of Artificial Sequence:  Synthetic
ugccaucucacagucaucc

SEQ ID NO: 489 - RNA, 19 nt, Artificial Sequence
  Description of Artificial Sequence:  Synthetic
cacgggcacuguuauggga

SEQ ID NO: 490 - RNA, 19 nt, Artificial Sequence
  Description of Artificial Sequence:  Synthetic
agcuguuaucauggagggc

SEQ ID NO: 491 - RNA, 19 nt, Artificial Sequence
  Description of Artificial Sequence:  Synthetic
cuucuacguugucuuugau

SEQ ID NO: 492 - RNA, 19 nt, Artificial Sequence
  Description of Artificial Sequence:  Synthetic
ucgggcccgaaaacgaauu

SEQ ID NO: 493 - RNA, 19 nt, Artificial Sequence
  Description of Artificial Sequence:  Synthetic
uggcuuugcugucagcgcu

SEQ ID NO: 494 - RNA, 19 nt, Artificial Sequence
  Description of Artificial Sequence:  Synthetic
uugccaugugcacgaugag

SEQ ID NO: 495 - RNA, 19 nt, Artificial Sequence
  Description of Artificial Sequence:  Synthetic
guucaggacggcagcggug

SEQ ID NO: 496 - RNA, 19 nt, Artificial Sequence
  Description of Artificial Sequence:  Synthetic
ggaaggcccuuuugucacc

SEQ ID NO: 497 - RNA, 19 nt, Artificial Sequence
  Description of Artificial Sequence:  Synthetic
cuuggacauggaagacugu

SEQ ID NO: 498 - RNA, 19 nt, Artificial Sequence
  Description of Artificial Sequence:  Synthetic
uggcuacaacauuccacag

SEQ ID NO: 499 - RNA, 19 nt, Artificial Sequence
  Description of Artificial Sequence:  Synthetic
gacagaugagucaacccuc

SEQ ID NO: 500 - RNA, 19 nt, Artificial Sequence
  Description of Artificial Sequence:  Synthetic
caugaccauagccuauguc

SEQ ID NO: 501 - RNA, 19 nt, Artificial Sequence
  Description of Artificial Sequence:  Synthetic
cauggcugccaucugcgcc

SEQ ID NO: 502 - RNA, 19 nt, Artificial Sequence
  Description of Artificial Sequence:  Synthetic
ccucuucaugcugccacuc

SEQ ID NO: 503 - RNA, 19 nt, Artificial Sequence
  Description of Artificial Sequence:  Synthetic
cugccucauggugugucag

SEQ ID NO: 504 - RNA, 19 nt, Artificial Sequence
  Description of Artificial Sequence:  Synthetic
guggcgcugccuccgcugc

SEQ ID NO: 505 - RNA, 19 nt, Artificial Sequence
  Description of Artificial Sequence:  Synthetic
ccugcgccagcagcaugau

SEQ ID NO: 506 - RNA, 19 nt, Artificial Sequence
  Description of Artificial Sequence:  Synthetic
ugacuuugcugaugacauc

SEQ ID NO: 507 - RNA, 19 nt, Artificial Sequence
  Description of Artificial Sequence:  Synthetic
cucccugcugaagugagga

SEQ ID NO: 508 - RNA, 19 nt, Artificial Sequence
  Description of Artificial Sequence:  Synthetic
aggcccaugggcagaagau

SEQ ID NO: 509 - RNA, 19 nt, Artificial Sequence
  Description of Artificial Sequence:  Synthetic
uagagauuccccuggacca

SEQ ID NO: 510 - RNA, 19 nt, Artificial Sequence
  Description of Artificial Sequence:  Synthetic
acaccuccgugguucacuu

SEQ ID NO: 511 - RNA, 19 nt, Artificial Sequence
  Description of Artificial Sequence:  Synthetic
uuggucacaaguaggagac

SEQ ID NO: 512 - RNA, 19 nt, Artificial Sequence
  Description of Artificial Sequence:  Synthetic
cacagauggcaccuguggc

SEQ ID NO: 513 - RNA, 19 nt, Artificial Sequence
  Description of Artificial Sequence:  Synthetic
ccagagcaccucaggaccc

SEQ ID NO: 514 - RNA, 19 nt, Artificial Sequence
  Description of Artificial Sequence:  Synthetic
cuccccacccaccaaaugc

SEQ ID NO: 515 - RNA, 19 nt, Artificial Sequence
  Description of Artificial Sequence:  Synthetic
ccucugccuugauggagaa

SEQ ID NO: 516 - RNA, 19 nt, Artificial Sequence
  Description of Artificial Sequence:  Synthetic
aggaaaaggcuggcaaggu

SEQ ID NO: 517 - RNA, 19 nt, Artificial Sequence
  Description of Artificial Sequence:  Synthetic
uggguuccagggacuguac

SEQ ID NO: 518 - RNA, 19 nt, Artificial Sequence
  Description of Artificial Sequence:  Synthetic
ccuguaggaaacagaaaag

SEQ ID NO: 519 - RNA, 19 nt, Artificial Sequence
  Description of Artificial Sequence:  Synthetic
gagaagaaagaagcacucu

SEQ ID NO: 520 - RNA, 19 nt, Artificial Sequence
  Description of Artificial Sequence:  Synthetic
ugcuggcgggaauacucuu

SEQ ID NO: 521 - RNA, 19 nt, Artificial Sequence
  Description of Artificial Sequence:  Synthetic
uggucaccucaaauuuaag

SEQ ID NO: 522 - RNA, 19 nt, Artificial Sequence
  Description of Artificial Sequence:  Synthetic
gucgggaaauucugcugcu

SEQ ID NO: 523 - RNA, 19 nt, Artificial Sequence
  Description of Artificial Sequence:  Synthetic
uugaaacuucagcccugaa

SEQ ID NO: 524 - RNA, 19 nt, Artificial Sequence
  Description of Artificial Sequence:  Synthetic
accuuuguccaccauuccu

SEQ ID NO: 525 - RNA, 19 nt, Artificial Sequence
  Description of Artificial Sequence:  Synthetic
uuuaaauucuccaacccaa

SEQ ID NO: 526 - RNA, 19 nt, Artificial Sequence
  Description of Artificial Sequence:  Synthetic
aaguauucuucuuuucuua

SEQ ID NO: 527 - RNA, 19 nt, Artificial Sequence
  Description of Artificial Sequence:  Synthetic
aguuucagaaguacuggca

SEQ ID NO: 528 - RNA, 19 nt, Artificial Sequence
  Description of Artificial Sequence:  Synthetic
aucacacgcagguuaccuu

SEQ ID NO: 529 - RNA, 19 nt, Artificial Sequence
  Description of Artificial Sequence:  Synthetic
uggcgugugucccuguggu

SEQ ID NO: 530 - RNA, 19 nt, Artificial Sequence
  Description of Artificial Sequence:  Synthetic
uacccuggcagagaagaga

SEQ ID NO: 531 - RNA, 19 nt, Artificial Sequence
  Description of Artificial Sequence:  Synthetic
accaagcuuguuucccugc

SEQ ID NO: 532 - RNA, 19 nt, Artificial Sequence
  Description of Artificial Sequence:  Synthetic
cuggccaaagucaguagga

SEQ ID NO: 533 - RNA, 19 nt, Artificial Sequence
  Description of Artificial Sequence:  Synthetic
agaggaugcacaguuugcu

SEQ ID NO: 534 - RNA, 19 nt, Artificial Sequence
  Description of Artificial Sequence:  Synthetic
uauuugcuuuagagacagg

SEQ ID NO: 535 - RNA, 19 nt, Artificial Sequence
  Description of Artificial Sequence:  Synthetic
ggacuguauaaacaagccu

SEQ ID NO: 536 - RNA, 19 nt, Artificial Sequence
  Description of Artificial Sequence:  Synthetic
uaacauuggugcaaagauu

SEQ ID NO: 537 - RNA, 19 nt, Artificial Sequence
  Description of Artificial Sequence:  Synthetic
ugccucuugaauuaaaaaa

SEQ ID NO: 538 - RNA, 19 nt, Artificial Sequence
  Description of Artificial Sequence:  Synthetic
aaaaaacuagauugacuau

SEQ ID NO: 539 - RNA, 19 nt, Artificial Sequence
  Description of Artificial Sequence:  Synthetic
uuuauacaaaugggggcgg

SEQ ID NO: 540 - RNA, 19 nt, Artificial Sequence
  Description of Artificial Sequence:  Synthetic
gcuggaaagaggagaagga

SEQ ID NO: 541 - RNA, 19 nt, Artificial Sequence
  Description of Artificial Sequence:  Synthetic
agagggaguacaaagacag

SEQ ID NO: 542 - RNA, 19 nt, Artificial Sequence
  Description of Artificial Sequence:  Synthetic
gggaauagugggaucaaag

SEQ ID NO: 543 - RNA, 19 nt, Artificial Sequence
  Description of Artificial Sequence:  Synthetic
gcuaggaaaggcagaaaca

SEQ ID NO: 544 - RNA, 19 nt, Artificial Sequence
  Description of Artificial Sequence:  Synthetic
acaaccacucaccaguccu

SEQ ID NO: 545 - RNA, 19 nt, Artificial Sequence
  Description of Artificial Sequence:  Synthetic
uaguuuuagaccucaucuc

SEQ ID NO: 546 - RNA, 19 nt, Artificial Sequence
  Description of Artificial Sequence:  Synthetic
ccaagauagcaucccaucu

SEQ ID NO: 547 - RNA, 19 nt, Artificial Sequence
  Description of Artificial Sequence:  Synthetic
ucagaagauggguguuguu

SEQ ID NO: 548 - RNA, 19 nt, Artificial Sequence
  Description of Artificial Sequence:  Synthetic
uuucaauguuuucuuuucu

SEQ ID NO: 549 - RNA, 19 nt, Artificial Sequence
  Description of Artificial Sequence:  Synthetic
ugugguugcagccugacca

SEQ ID NO: 550 - RNA, 19 nt, Artificial Sequence
  Description of Artificial Sequence:  Synthetic
aaaagugagaugggaaggg

SEQ ID NO: 551 - RNA, 19 nt, Artificial Sequence
  Description of Artificial Sequence:  Synthetic
gcuuaucuagccaaagagc

SEQ ID NO: 552 - RNA, 19 nt, Artificial Sequence
  Description of Artificial Sequence:  Synthetic
cucuuuuuuagcucucuua

SEQ ID NO: 553 - RNA, 19 nt, Artificial Sequence
  Description of Artificial Sequence:  Synthetic
aaaugaagugcccacuaag

SEQ ID NO: 554 - RNA, 19 nt, Artificial Sequence
  Description of Artificial Sequence:  Synthetic
gaaguuccacuuaacacau

SEQ ID NO: 555 - RNA, 19 nt, Artificial Sequence
  Description of Artificial Sequence:  Synthetic
ugaauuucugccauauuaa

SEQ ID NO: 556 - RNA, 19 nt, Artificial Sequence
  Description of Artificial Sequence:  Synthetic
auuucauugucucuaucug

SEQ ID NO: 557 - RNA, 19 nt, Artificial Sequence
  Description of Artificial Sequence:  Synthetic
gaaccacccuuuauucuac

SEQ ID NO: 558 - RNA, 19 nt, Artificial Sequence
  Description of Artificial Sequence:  Synthetic
cauaugauaggcagcacug

SEQ ID NO: 559 - RNA, 19 nt, Artificial Sequence
  Description of Artificial Sequence:  Synthetic
gaaauauccuaacccccua

SEQ ID NO: 560 - RNA, 19 nt, Artificial Sequence
  Description of Artificial Sequence:  Synthetic
aagcuccaggugcccugug

SEQ ID NO: 561 - RNA, 19 nt, Artificial Sequence
  Description of Artificial Sequence:  Synthetic
gggagagcaacuggacuau

SEQ ID NO: 562 - RNA, 19 nt, Artificial Sequence
  Description of Artificial Sequence:  Synthetic
uagcagggcugggcucugu

SEQ ID NO: 563 - RNA, 19 nt, Artificial Sequence
  Description of Artificial Sequence:  Synthetic
ucuuccuggucauaggcuc

SEQ ID NO: 564 - RNA, 19 nt, Artificial Sequence
  Description of Artificial Sequence:  Synthetic
cacucuuucccccaaaucu

SEQ ID NO: 565 - RNA, 19 nt, Artificial Sequence
  Description of Artificial Sequence:  Synthetic
uuccucuggagcuuugcag

SEQ ID NO: 566 - RNA, 19 nt, Artificial Sequence
  Description of Artificial Sequence:  Synthetic
gccaaggugcuaaaaggaa

SEQ ID NO: 567 - RNA, 19 nt, Artificial Sequence
  Description of Artificial Sequence:  Synthetic
auagguaggagaccucuuc

SEQ ID NO: 568 - RNA, 19 nt, Artificial Sequence
  Description of Artificial Sequence:  Synthetic
cuaucuaauccuuaaaagc

SEQ ID NO: 569 - RNA, 19 nt, Artificial Sequence
  Description of Artificial Sequence:  Synthetic
cauaauguugaacauucau

SEQ ID NO: 570 - RNA, 19 nt, Artificial Sequence
  Description of Artificial Sequence:  Synthetic
uucaacagcugaugcccua

SEQ ID NO: 571 - RNA, 19 nt, Artificial Sequence
  Description of Artificial Sequence:  Synthetic
auaaccccugccuggauuu

SEQ ID NO: 572 - RNA, 19 nt, Artificial Sequence
  Description of Artificial Sequence:  Synthetic
ucuuccuauuaggcuauaa

SEQ ID NO: 573 - RNA, 19 nt, Artificial Sequence
  Description of Artificial Sequence:  Synthetic
agaaguagcaagaucuuua

SEQ ID NO: 574 - RNA, 19 nt, Artificial Sequence
  Description of Artificial Sequence:  Synthetic
acauaauucagagugguuu

SEQ ID NO: 575 - RNA, 19 nt, Artificial Sequence
  Description of Artificial Sequence:  Synthetic
ucauugccuuccuacccuc

SEQ ID NO: 576 - RNA, 19 nt, Artificial Sequence
  Description of Artificial Sequence:  Synthetic
cucuaauggccccuccauu

SEQ ID NO: 577 - RNA, 19 nt, Artificial Sequence
  Description of Artificial Sequence:  Synthetic
uuauuugacuaaagcauca

SEQ ID NO: 578 - RNA, 19 nt, Artificial Sequence
  Description of Artificial Sequence:  Synthetic
acacaguggcacuagcauu

SEQ ID NO: 579 - RNA, 19 nt, Artificial Sequence
  Description of Artificial Sequence:  Synthetic
uauaccaagaguaugagaa

SEQ ID NO: 580 - RNA, 19 nt, Artificial Sequence
  Description of Artificial Sequence:  Synthetic
aauacagugcuuuauggcu

SEQ ID NO: 581 - RNA, 19 nt, Artificial Sequence
  Description of Artificial Sequence:  Synthetic
ucuaacauuacugccuuca

SEQ ID NO: 582 - RNA, 19 nt, Artificial Sequence
  Description of Artificial Sequence:  Synthetic
aguaucaaggcugccugga

SEQ ID NO: 583 - RNA, 19 nt, Artificial Sequence
  Description of Artificial Sequence:  Synthetic
agaaaggauggcagccuca

SEQ ID NO: 584 - RNA, 19 nt, Artificial Sequence
  Description of Artificial Sequence:  Synthetic
agggcuuccuuauguccuc

SEQ ID NO: 585 - RNA, 19 nt, Artificial Sequence
  Description of Artificial Sequence:  Synthetic
ccaccacaagagcuccuug

SEQ ID NO: 586 - RNA, 19 nt, Artificial Sequence
  Description of Artificial Sequence:  Synthetic
gaugaaggucaucuuuuuc

SEQ ID NO: 587 - RNA, 19 nt, Artificial Sequence
  Description of Artificial Sequence:  Synthetic
ccccuauccuguucuuccc

SEQ ID NO: 588 - RNA, 19 nt, Artificial Sequence
  Description of Artificial Sequence:  Synthetic
ccuccccgcuccuaauggu

SEQ ID NO: 589 - RNA, 19 nt, Artificial Sequence
  Description of Artificial Sequence:  Synthetic
uacguggguacccaggcug

SEQ ID NO: 590 - RNA, 19 nt, Artificial Sequence
  Description of Artificial Sequence:  Synthetic
gguucuugggcuagguagu

SEQ ID NO: 591 - RNA, 19 nt, Artificial Sequence
  Description of Artificial Sequence:  Synthetic
uggggaccaaguucauuac

SEQ ID NO: 592 - RNA, 19 nt, Artificial Sequence
  Description of Artificial Sequence:  Synthetic
ccucccuaucaguucuagc

SEQ ID NO: 593 - RNA, 19 nt, Artificial Sequence
  Description of Artificial Sequence:  Synthetic
cauaguaaacuacgguacc

SEQ ID NO: 594 - RNA, 19 nt, Artificial Sequence
  Description of Artificial Sequence:  Synthetic
caguguuagugggaagagc

SEQ ID NO: 595 - RNA, 19 nt, Artificial Sequence
  Description of Artificial Sequence:  Synthetic
cuggguuuuccuaguauac

SEQ ID NO: 596 - RNA, 19 nt, Artificial Sequence
  Description of Artificial Sequence:  Synthetic
cccacugcauccuacuccu

SEQ ID NO: 597 - RNA, 19 nt, Artificial Sequence
  Description of Artificial Sequence:  Synthetic
uaccuggucaacccgcugc

SEQ ID NO: 598 - RNA, 19 nt, Artificial Sequence
  Description of Artificial Sequence:  Synthetic
cuuccagguaugggaccug

SEQ ID NO: 599 - RNA, 19 nt, Artificial Sequence
  Description of Artificial Sequence:  Synthetic
gcuaaguguggaauuaccu

SEQ ID NO: 600 - RNA, 19 nt, Artificial Sequence
  Description of Artificial Sequence:  Synthetic
ugauaagggagagggaaau

SEQ ID NO: 601 - RNA, 19 nt, Artificial Sequence
  Description of Artificial Sequence:  Synthetic
uacaaggagggccucuggu

SEQ ID NO: 602 - RNA, 19 nt, Artificial Sequence
  Description of Artificial Sequence:  Synthetic
uguuccuggccucagccag

SEQ ID NO: 603 - RNA, 19 nt, Artificial Sequence
  Description of Artificial Sequence:  Synthetic
gcugcccacaagccauaaa

SEQ ID NO: 604 - RNA, 19 nt, Artificial Sequence
  Description of Artificial Sequence:  Synthetic
accaauaaaacaagaauac

SEQ ID NO: 605 - RNA, 19 nt, Artificial Sequence
  Description of Artificial Sequence:  Synthetic
cugagucaguuuuuuaucu

SEQ ID NO: 606 - RNA, 19 nt, Artificial Sequence
  Description of Artificial Sequence:  Synthetic
uggguucucuucauuccca

SEQ ID NO: 607 - RNA, 19 nt, Artificial Sequence
  Description of Artificial Sequence:  Synthetic
acugcacuuggugcugcuu

SEQ ID NO: 608 - RNA, 19 nt, Artificial Sequence
  Description of Artificial Sequence:  Synthetic
uuggcugacugggaacacc

SEQ ID NO: 609 - RNA, 19 nt, Artificial Sequence
  Description of Artificial Sequence:  Synthetic
cccauaacuacagagucug

SEQ ID NO: 610 - RNA, 19 nt, Artificial Sequence
  Description of Artificial Sequence:  Synthetic
gacaggaagacuggagacu

SEQ ID NO: 611 - RNA, 19 nt, Artificial Sequence
  Description of Artificial Sequence:  Synthetic
uguccacuucuagcucgga

SEQ ID NO: 612 - RNA, 19 nt, Artificial Sequence
  Description of Artificial Sequence:  Synthetic
aacuuacuguguaaauaaa

SEQ ID NO: 613 - RNA, 19 nt, Artificial Sequence
  Description of Artificial Sequence:  Synthetic
acuuucagaacugcuacca

SEQ ID NO: 614 - RNA, 19 nt, Artificial Sequence
  Description of Artificial Sequence:  Synthetic
augaagugaaaaugccaca

SEQ ID NO: 615 - RNA, 19 nt, Artificial Sequence
  Description of Artificial Sequence:  Synthetic
auuuugcuuuauaauuucu

SEQ ID NO: 616 - RNA, 19 nt, Artificial Sequence
  Description of Artificial Sequence:  Synthetic
uacccauguugggaaaaac

SEQ ID NO: 617 - RNA, 19 nt, Artificial Sequence
  Description of Artificial Sequence:  Synthetic
cuggcuuuuucccagcccu

SEQ ID NO: 618 - RNA, 19 nt, Artificial Sequence
  Description of Artificial Sequence:  Synthetic
uuuccagggcauaaaacuc

SEQ ID NO: 619 - RNA, 19 nt, Artificial Sequence
  Description of Artificial Sequence:  Synthetic
caaccccuucgauagcaag

SEQ ID NO: 620 - RNA, 19 nt, Artificial Sequence
  Description of Artificial Sequence:  Synthetic
gucccaucagccuauuauu

SEQ ID NO: 621 - RNA, 19 nt, Artificial Sequence
  Description of Artificial Sequence:  Synthetic
uuuuuuaaagaaaacuugc

SEQ ID NO: 622 - RNA, 19 nt, Artificial Sequence
  Description of Artificial Sequence:  Synthetic
cacuuguuuuucuuuuuac

SEQ ID NO: 623 - RNA, 19 nt, Artificial Sequence
  Description of Artificial Sequence:  Synthetic
caguuacuuccuuccugcc

SEQ ID NO: 624 - RNA, 19 nt, Artificial Sequence
  Description of Artificial Sequence:  Synthetic
cccaaaauuauaaacucua

SEQ ID NO: 625 - RNA, 19 nt, Artificial Sequence
  Description of Artificial Sequence:  Synthetic
aaguguaaaaaaaagucuu

SEQ ID NO: 626 - RNA, 19 nt, Artificial Sequence
  Description of Artificial Sequence:  Synthetic
uaacaacagcuucuugcuu

SEQ ID NO: 627 - RNA, 19 nt, Artificial Sequence
  Description of Artificial Sequence:  Synthetic
uguaaaaauauguauuaua

SEQ ID NO: 628 - RNA, 19 nt, Artificial Sequence
  Description of Artificial Sequence:  Synthetic
acaucuguauuuuuaaauu

SEQ ID NO: 629 - RNA, 19 nt, Artificial Sequence
  Description of Artificial Sequence:  Synthetic
ucugcuccugaaaaaugac

SEQ ID NO: 630 - RNA, 19 nt, Artificial Sequence
  Description of Artificial Sequence:  Synthetic
cugucccauucuccacuca

SEQ ID NO: 631 - RNA, 19 nt, Artificial Sequence
  Description of Artificial Sequence:  Synthetic
acugcauuuggggccuuuc

SEQ ID NO: 632 - RNA, 19 nt, Artificial Sequence
  Description of Artificial Sequence:  Synthetic
cccauuggucugcaugucu

SEQ ID NO: 633 - RNA, 19 nt, Artificial Sequence
  Description of Artificial Sequence:  Synthetic
uuuuaucauugcaggccag

SEQ ID NO: 634 - RNA, 19 nt, Artificial Sequence
  Description of Artificial Sequence:  Synthetic
guggacagagggagaaggg

SEQ ID NO: 635 - RNA, 19 nt, Artificial Sequence
  Description of Artificial Sequence:  Synthetic
gagaacaggggucgccaac

SEQ ID NO: 636 - RNA, 19 nt, Artificial Sequence
  Description of Artificial Sequence:  Synthetic
cacuuguguugcuuucuga

SEQ ID NO: 637 - RNA, 19 nt, Artificial Sequence
  Description of Artificial Sequence:  Synthetic
acugauccugaacaagaaa

SEQ ID NO: 638 - RNA, 19 nt, Artificial Sequence
  Description of Artificial Sequence:  Synthetic
agaguaacacugaggcgcu

SEQ ID NO: 639 - RNA, 19 nt, Artificial Sequence
  Description of Artificial Sequence:  Synthetic
ucgcucccaugcacaacuc

SEQ ID NO: 640 - RNA, 19 nt, Artificial Sequence
  Description of Artificial Sequence:  Synthetic
cuccaaaacacuuauccuc

SEQ ID NO: 641 - RNA, 19 nt, Artificial Sequence
  Description of Artificial Sequence:  Synthetic
ccugcaagagugggcuuuc

SEQ ID NO: 642 - RNA, 19 nt, Artificial Sequence
  Description of Artificial Sequence:  Synthetic
ccagggucuuuacugggaa

SEQ ID NO: 643 - RNA, 19 nt, Artificial Sequence
  Description of Artificial Sequence:  Synthetic
agcaguuaagcccccuccu

SEQ ID NO: 644 - RNA, 19 nt, Artificial Sequence
  Description of Artificial Sequence:  Synthetic
ucaccccuuccuuuuuucu

SEQ ID NO: 645 - RNA, 19 nt, Artificial Sequence
  Description of Artificial Sequence:  Synthetic
uuucuuuacuccuuuggcu

SEQ ID NO: 646 - RNA, 19 nt, Artificial Sequence
  Description of Artificial Sequence:  Synthetic
uucaaaggauuuuggaaaa

SEQ ID NO: 647 - RNA, 19 nt, Artificial Sequence
  Description of Artificial Sequence:  Synthetic
agaaacaauaugcuuuaca

SEQ ID NO: 648 - RNA, 19 nt, Artificial Sequence
  Description of Artificial Sequence:  Synthetic
acucauuuucaauuucuaa

SEQ ID NO: 649 - RNA, 19 nt, Artificial Sequence
  Description of Artificial Sequence:  Synthetic
aauuugcaggggauacuga

SEQ ID NO: 650 - RNA, 19 nt, Artificial Sequence
  Description of Artificial Sequence:  Synthetic
aaaaauacggcagguggcc

SEQ ID NO: 651 - RNA, 19 nt, Artificial Sequence
  Description of Artificial Sequence:  Synthetic
cuaaggcugcuguaaaguu

SEQ ID NO: 652 - RNA, 19 nt, Artificial Sequence
  Description of Artificial Sequence:  Synthetic
ugaggggagaggaaaucuu

SEQ ID NO: 653 - RNA, 19 nt, Artificial Sequence
  Description of Artificial Sequence:  Synthetic
uaagauuacaagauaaaaa

SEQ ID NO: 654 - RNA, 19 nt, Artificial Sequence
  Description of Artificial Sequence:  Synthetic
aacgaauccccuaaacaaa

SEQ ID NO: 655 - RNA, 19 nt, Artificial Sequence
  Description of Artificial Sequence:  Synthetic
aaagaacaauagaacuggu

SEQ ID NO: 656 - RNA, 19 nt, Artificial Sequence
  Description of Artificial Sequence:  Synthetic
ucuuccauuuugccaccuu

SEQ ID NO: 657 - RNA, 19 nt, Artificial Sequence
  Description of Artificial Sequence:  Synthetic
uuccuguucaugacagcua

SEQ ID NO: 658 - RNA, 19 nt, Artificial Sequence
  Description of Artificial Sequence:  Synthetic
acuaaccuggagacaguaa

SEQ ID NO: 659 - RNA, 19 nt, Artificial Sequence
  Description of Artificial Sequence:  Synthetic
acauuucauuaaccaaaga

SEQ ID NO: 660 - RNA, 19 nt, Artificial Sequence
  Description of Artificial Sequence:  Synthetic
aaagugggucaccugaccu

SEQ ID NO: 661 - RNA, 19 nt, Artificial Sequence
  Description of Artificial Sequence:  Synthetic
ucugaagagcugaguacuc

SEQ ID NO: 662 - RNA, 19 nt, Artificial Sequence
  Description of Artificial Sequence:  Synthetic
caggccacuccaaucaccc

SEQ ID NO: 663 - RNA, 19 nt, Artificial Sequence
  Description of Artificial Sequence:  Synthetic
cuacaagaugccaaggagg

SEQ ID NO: 664 - RNA, 19 nt, Artificial Sequence
  Description of Artificial Sequence:  Synthetic
gucccaggaaguccagcuc

SEQ ID NO: 665 - RNA, 19 nt, Artificial Sequence
  Description of Artificial Sequence:  Synthetic
ccuuaaacugacgcuaguc

SEQ ID NO: 666 - RNA, 19 nt, Artificial Sequence
  Description of Artificial Sequence:  Synthetic
caauaaaccugggcaagug

SEQ ID NO: 667 - RNA, 19 nt, Artificial Sequence
  Description of Artificial Sequence:  Synthetic
gaggcaagagaaaugagga

SEQ ID NO: 668 - RNA, 19 nt, Artificial Sequence
  Description of Artificial Sequence:  Synthetic
aagaauccaucugugaggu

SEQ ID NO: 669 - RNA, 19 nt, Artificial Sequence
  Description of Artificial Sequence:  Synthetic
ugacaggcaaggaugaaag

SEQ ID NO: 670 - RNA, 19 nt, Artificial Sequence
  Description of Artificial Sequence:  Synthetic
gacaaagaaggaaaagagu

SEQ ID NO: 671 - RNA, 19 nt, Artificial Sequence
  Description of Artificial Sequence:  Synthetic
uaucaaaggcagaaaggag

SEQ ID NO: 672 - RNA, 19 nt, Artificial Sequence
  Description of Artificial Sequence:  Synthetic
gaucauuuaguugggucug

SEQ ID NO: 673 - RNA, 19 nt, Artificial Sequence
  Description of Artificial Sequence:  Synthetic
gaaaggaaaagucuuugcu

SEQ ID NO: 674 - RNA, 19 nt, Artificial Sequence
  Description of Artificial Sequence:  Synthetic
uauccgacauguacugcua

SEQ ID NO: 675 - RNA, 19 nt, Artificial Sequence
  Description of Artificial Sequence:  Synthetic
aguaccuguaagcauuuua

SEQ ID NO: 676 - RNA, 19 nt, Artificial Sequence
  Description of Artificial Sequence:  Synthetic
aggucccagaauggaaaaa

SEQ ID NO: 677 - RNA, 19 nt, Artificial Sequence
  Description of Artificial Sequence:  Synthetic
aaaaaucagcuauugguaa

SEQ ID NO: 678 - RNA, 19 nt, Artificial Sequence
  Description of Artificial Sequence:  Synthetic
auauaauaauguccuuucc

SEQ ID NO: 679 - RNA, 19 nt, Artificial Sequence
  Description of Artificial Sequence:  Synthetic
ccuggagucaguuuuuuua

SEQ ID NO: 680 - RNA, 19 nt, Artificial Sequence
  Description of Artificial Sequence:  Synthetic
aaaaaguuaacucuuaguu

SEQ ID NO: 681 - RNA, 19 nt, Artificial Sequence
  Description of Artificial Sequence:  Synthetic
uuuuacuuguuuaauucua

SEQ ID NO: 682 - RNA, 19 nt, Artificial Sequence
  Description of Artificial Sequence:  Synthetic
aaaagagaagggagcugag

SEQ ID NO: 683 - RNA, 19 nt, Artificial Sequence
  Description of Artificial Sequence:  Synthetic
ggccauucccuguaggagu

SEQ ID NO: 684 - RNA, 19 nt, Artificial Sequence
  Description of Artificial Sequence:  Synthetic
uaaagauaaaaggauagga

SEQ ID NO: 685 - RNA, 19 nt, Artificial Sequence
  Description of Artificial Sequence:  Synthetic
aaaagauucaaagcucuaa

SEQ ID NO: 686 - RNA, 19 nt, Artificial Sequence
  Description of Artificial Sequence:  Synthetic
auagagucacagcuuuccc

SEQ ID NO: 687 - RNA, 19 nt, Artificial Sequence
  Description of Artificial Sequence:  Synthetic
cagguauaaaaccuaaaau

SEQ ID NO: 688 - RNA, 19 nt, Artificial Sequence
  Description of Artificial Sequence:  Synthetic
uuaagaaguacaauaagca

SEQ ID NO: 689 - RNA, 19 nt, Artificial Sequence
  Description of Artificial Sequence:  Synthetic
agagguggaaaaugaucua

SEQ ID NO: 690 - RNA, 19 nt, Artificial Sequence
  Description of Artificial Sequence:  Synthetic
aguuccugauagcuaccca

SEQ ID NO: 691 - RNA, 19 nt, Artificial Sequence
  Description of Artificial Sequence:  Synthetic
acagagcaagugauuuaua

SEQ ID NO: 692 - RNA, 19 nt, Artificial Sequence
  Description of Artificial Sequence:  Synthetic
aaauuugaaauccaaacua

SEQ ID NO: 693 - RNA, 19 nt, Artificial Sequence
  Description of Artificial Sequence:  Synthetic
acuuucuuaauaucacuuu

SEQ ID NO: 694 - RNA, 19 nt, Artificial Sequence
  Description of Artificial Sequence:  Synthetic
uggucuccauuuuucccag

SEQ ID NO: 695 - RNA, 19 nt, Artificial Sequence
  Description of Artificial Sequence:  Synthetic
ggacaggaaauaugucccc

SEQ ID NO: 696 - RNA, 19 nt, Artificial Sequence
  Description of Artificial Sequence:  Synthetic
ccccuaacuuucuugcuuc

SEQ ID NO: 697 - RNA, 19 nt, Artificial Sequence
  Description of Artificial Sequence:  Synthetic
caaaaauuaaaauccagca

SEQ ID NO: 698 - RNA, 19 nt, Artificial Sequence
  Description of Artificial Sequence:  Synthetic
aucccaagaucauucuaca

SEQ ID NO: 699 - RNA, 19 nt, Artificial Sequence
  Description of Artificial Sequence:  Synthetic
aaguaauuuugcacagaca

SEQ ID NO: 700 - RNA, 19 nt, Artificial Sequence
  Description of Artificial Sequence:  Synthetic
aucuccucaccccagugcc

SEQ ID NO: 701 - RNA, 19 nt, Artificial Sequence
  Description of Artificial Sequence:  Synthetic
cugucuggagcucacccaa

SEQ ID NO: 702 - RNA, 19 nt, Artificial Sequence
  Description of Artificial Sequence:  Synthetic
aggucaccaaacaacuugg

SEQ ID NO: 703 - RNA, 19 nt, Artificial Sequence
  Description of Artificial Sequence:  Synthetic
guugugaaccaacugccuu

SEQ ID NO: 704 - RNA, 19 nt, Artificial Sequence
  Description of Artificial Sequence:  Synthetic
uaaccuucugggggagggg

SEQ ID NO: 705 - RNA, 19 nt, Artificial Sequence
  Description of Artificial Sequence:  Synthetic
ggauuagcuagacuaggag

SEQ ID NO: 706 - RNA, 19 nt, Artificial Sequence
  Description of Artificial Sequence:  Synthetic
gaccagaagugaaugggaa

SEQ ID NO: 707 - RNA, 19 nt, Artificial Sequence
  Description of Artificial Sequence:  Synthetic
aagggugaggacuucacaa

SEQ ID NO: 708 - RNA, 19 nt, Artificial Sequence
  Description of Artificial Sequence:  Synthetic
auguuggccugucagagcu

SEQ ID NO: 709 - RNA, 19 nt, Artificial Sequence
  Description of Artificial Sequence:  Synthetic
uugauuagaagccaagaca

SEQ ID NO: 710 - RNA, 19 nt, Artificial Sequence
  Description of Artificial Sequence:  Synthetic
aguggcagcaaaggaagac

SEQ ID NO: 711 - RNA, 19 nt, Artificial Sequence
  Description of Artificial Sequence:  Synthetic
cuuggcccaggaaaaaccu

SEQ ID NO: 712 - RNA, 19 nt, Artificial Sequence
  Description of Artificial Sequence:  Synthetic
uguggguugugcuaauuuc

SEQ ID NO: 713 - RNA, 19 nt, Artificial Sequence
  Description of Artificial Sequence:  Synthetic
cuguccagaaaauagggug

SEQ ID NO: 714 - RNA, 19 nt, Artificial Sequence
  Description of Artificial Sequence:  Synthetic
ggacagaagcuuguggggu

SEQ ID NO: 715 - RNA, 19 nt, Artificial Sequence
  Description of Artificial Sequence:  Synthetic
ugcauggaggaauugggac

SEQ ID NO: 716 - RNA, 19 nt, Artificial Sequence
  Description of Artificial Sequence:  Synthetic
ccugguuauguuguuauuc

SEQ ID NO: 717 - RNA, 19 nt, Artificial Sequence
  Description of Artificial Sequence:  Synthetic
cucggacugugaauuuugg

SEQ ID NO: 718 - RNA, 19 nt, Artificial Sequence
  Description of Artificial Sequence:  Synthetic
gugauguaaaacagaauau

SEQ ID NO: 719 - RNA, 19 nt, Artificial Sequence
  Description of Artificial Sequence:  Synthetic
uucuguaaaccuaaugucu

SEQ ID NO: 720 - RNA, 19 nt, Artificial Sequence
  Description of Artificial Sequence:  Synthetic
uguauaaauaaugagcguu

SEQ ID NO: 721 - RNA, 19 nt, Artificial Sequence
  Description of Artificial Sequence:  Synthetic
uaacacaguaaaauauuca

SEQ ID NO: 722 - RNA, 19 nt, Artificial Sequence
  Description of Artificial Sequence:  Synthetic
aauaagaagucaaaaaaaa

SEQ ID NO: 723 - RNA, 19 nt, Artificial Sequence
  Description of Artificial Sequence:  Synthetic
aagucaaaaaaaaaaaaaa

SEQ ID NO: 724 - RNA, 19 nt, Artificial Sequence
  Description of Artificial Sequence:  Synthetic
cgggcuggggacgagugcg

SEQ ID NO: 725 - RNA, 19 nt, Artificial Sequence
  Description of Artificial Sequence:  Synthetic
cggcucgcagcucccgggc

SEQ ID NO: 726 - RNA, 19 nt, Artificial Sequence
  Description of Artificial Sequence:  Synthetic
ccaccauaauccagcucgc

SEQ ID NO: 727 - RNA, 19 nt, Artificial Sequence
  Description of Artificial Sequence:  Synthetic
cugcguuggcugcucaggc

SEQ ID NO: 728 - RNA, 19 nt, Artificial Sequence
  Description of Artificial Sequence:  Synthetic
ggcuccgggcuccugcggc

SEQ ID NO: 729 - RNA, 19 nt, Artificial Sequence
  Description of Artificial Sequence:  Synthetic
ggcgcgggcaggggcaagg

SEQ ID NO: 730 - RNA, 19 nt, Artificial Sequence
  Description of Artificial Sequence:  Synthetic
guccccccggcgggcggcg

SEQ ID NO: 731 - RNA, 19 nt, Artificial Sequence
  Description of Artificial Sequence:  Synthetic
ccgguggcggcuucccugg

SEQ ID NO: 732 - RNA, 19 nt, Artificial Sequence
  Description of Artificial Sequence:  Synthetic
aggggcgggcauggcgggc

SEQ ID NO: 733 - RNA, 19 nt, Artificial Sequence
  Description of Artificial Sequence:  Synthetic
gcucccggcggggcuggga

SEQ ID NO: 734 - RNA, 19 nt, Artificial Sequence
  Description of Artificial Sequence:  Synthetic
ccugggcagcgggcgcggg

SEQ ID NO: 735 - RNA, 19 nt, Artificial Sequence
  Description of Artificial Sequence:  Synthetic
cggcacggcggcggccagc

SEQ ID NO: 736 - RNA, 19 nt, Artificial Sequence
  Description of Artificial Sequence:  Synthetic
auccggagcccgcuacauc

SEQ ID NO: 737 - RNA, 19 nt, Artificial Sequence
  Description of Artificial Sequence:  Synthetic
agcaggggagaggcuggga

SEQ ID NO: 738 - RNA, 19 nt, Artificial Sequence
  Description of Artificial Sequence:  Synthetic
agauccgcagagcacggga

SEQ ID NO: 739 - RNA, 19 nt, Artificial Sequence
  Description of Artificial Sequence:  Synthetic
guggagagcggucagggga

SEQ ID NO: 740 - RNA, 19 nt, Artificial Sequence
  Description of Artificial Sequence:  Synthetic
agcccccggguccgggcug

SEQ ID NO: 741 - RNA, 19 nt, Artificial Sequence
  Description of Artificial Sequence:  Synthetic
ccugcagggcccugggcca

SEQ ID NO: 742 - RNA, 19 nt, Artificial Sequence
  Description of Artificial Sequence:  Synthetic
ggcaucaggacgccagggc

SEQ ID NO: 743 - RNA, 19 nt, Artificial Sequence
  Description of Artificial Sequence:  Synthetic
caggagagggagcuugggg

SEQ ID NO: 744 - RNA, 19 nt, Artificial Sequence
  Description of Artificial Sequence:  Synthetic
guggugcugguggcuucuc

SEQ ID NO: 745 - RNA, 19 nt, Artificial Sequence
  Description of Artificial Sequence:  Synthetic
gccugcccccaagucuggg

SEQ ID NO: 746 - RNA, 19 nt, Artificial Sequence
  Description of Artificial Sequence:  Synthetic
cccacguccgucccuggcg

SEQ ID NO: 747 - RNA, 19 nt, Artificial Sequence
  Description of Artificial Sequence:  Synthetic
ccucugggcucgcacuggc

SEQ ID NO: 748 - RNA, 19 nt, Artificial Sequence
  Description of Artificial Sequence:  Synthetic
gggccccggccuucgggcc

SEQ ID NO: 749 - RNA, 19 nt, Artificial Sequence
  Description of Artificial Sequence:  Synthetic
cagggcuugggccauggug

SEQ ID NO: 750 - RNA, 19 nt, Artificial Sequence
  Description of Artificial Sequence:  Synthetic
ccacagcaggagccagggc

SEQ ID NO: 751 - RNA, 19 nt, Artificial Sequence
  Description of Artificial Sequence:  Synthetic
cagcacucccgcgcccauc

SEQ ID NO: 752 - RNA, 19 nt, Artificial Sequence
  Description of Artificial Sequence:  Synthetic
cugggugccgugggcaggc

SEQ ID NO: 753 - RNA, 19 nt, Artificial Sequence
  Description of Artificial Sequence:  Synthetic
gggcagccggaugccgugc

SEQ ID NO: 754 - RNA, 19 nt, Artificial Sequence
  Description of Artificial Sequence:  Synthetic
ccccaggccgcugcgcagg

SEQ ID NO: 755 - RNA, 19 nt, Artificial Sequence
  Description of Artificial Sequence:  Synthetic
cagccccaggggggcgccc

SEQ ID NO: 756 - RNA, 19 nt, Artificial Sequence
  Description of Artificial Sequence:  Synthetic
ggucucccggggcagccgc

SEQ ID NO: 757 - RNA, 19 nt, Artificial Sequence
  Description of Artificial Sequence:  Synthetic
cuccucgggcucuucgucg

SEQ ID NO: 758 - RNA, 19 nt, Artificial Sequence
  Description of Artificial Sequence:  Synthetic
gcugccccuccggccgggc

SEQ ID NO: 759 - RNA, 19 nt, Artificial Sequence
  Description of Artificial Sequence:  Synthetic
guccaccaucuccacaaag

SEQ ID NO: 760 - RNA, 19 nt, Artificial Sequence
  Description of Artificial Sequence:  Synthetic
cgacuugccccucagguug

SEQ ID NO: 761 - RNA, 19 nt, Artificial Sequence
  Description of Artificial Sequence:  Synthetic
cacguaguagcccugcccc

SEQ ID NO: 762 - RNA, 19 nt, Artificial Sequence
  Description of Artificial Sequence:  Synthetic
gcugcccacggucaucucc

SEQ ID NO: 763 - RNA, 19 nt, Artificial Sequence
  Description of Artificial Sequence:  Synthetic
guugagcgucugcgggggg

SEQ ID NO: 764 - RNA, 19 nt, Artificial Sequence
  Description of Artificial Sequence:  Synthetic
gccuguauccaccaggaug

SEQ ID NO: 765 - RNA, 19 nt, Artificial Sequence
  Description of Artificial Sequence:  Synthetic
cacugcaaaguuacugcug

SEQ ID NO: 766 - RNA, 19 nt, Artificial Sequence
  Description of Artificial Sequence:  Synthetic
gggguggggggcagcaccc

SEQ ID NO: 767 - RNA, 19 nt, Artificial Sequence
  Description of Artificial Sequence:  Synthetic
guaguagcgaugcaggaag

SEQ ID NO: 768 - RNA, 19 nt, Artificial Sequence
  Description of Artificial Sequence:  Synthetic
gcuggacagcugccucugg

SEQ ID NO: 769 - RNA, 19 nt, Artificial Sequence
  Description of Artificial Sequence:  Synthetic
ccggaggucccgguaugug

SEQ ID NO: 770 - RNA, 19 nt, Artificial Sequence
  Description of Artificial Sequence:  Synthetic
gggcacauacacacccuuc

SEQ ID NO: 771 - RNA, 19 nt, Artificial Sequence
  Description of Artificial Sequence:  Synthetic
ccacuugcccuggguguag

SEQ ID NO: 772 - RNA, 19 nt, Artificial Sequence
  Description of Artificial Sequence:  Synthetic
ggugcccagcuccccuucc

SEQ ID NO: 773 - RNA, 19 nt, Artificial Sequence
  Description of Artificial Sequence:  Synthetic
ggggaugcuuaccaggucg

SEQ ID NO: 774 - RNA, 19 nt, Artificial Sequence
  Description of Artificial Sequence:  Synthetic
agugacguuggggccaugg

SEQ ID NO: 775 - RNA, 19 nt, Artificial Sequence
  Description of Artificial Sequence:  Synthetic
agcaauguuggcacgcaca

SEQ ID NO: 776 - RNA, 19 nt, Artificial Sequence
  Description of Artificial Sequence:  Synthetic
gucugauucagugauggca

SEQ ID NO: 777 - RNA, 19 nt, Artificial Sequence
  Description of Artificial Sequence:  Synthetic
gccguugaugaagaacuug

SEQ ID NO: 778 - RNA, 19 nt, Artificial Sequence
  Description of Artificial Sequence:  Synthetic
gaugccuucccaguuggag

SEQ ID NO: 779 - RNA, 19 nt, Artificial Sequence
  Description of Artificial Sequence:  Synthetic
agcauaggccagccccagg

SEQ ID NO: 780 - RNA, 19 nt, Artificial Sequence
  Description of Artificial Sequence:  Synthetic
gucaggccuggcaaucuca

SEQ ID NO: 781 - RNA, 19 nt, Artificial Sequence
  Description of Artificial Sequence:  Synthetic
gaaaggcuccagggagucg

SEQ ID NO: 782 - RNA, 19 nt, Artificial Sequence
  Description of Artificial Sequence:  Synthetic
cuuuaccagagagucaaag

SEQ ID NO: 783 - RNA, 19 nt, Artificial Sequence
  Description of Artificial Sequence:  Synthetic
guugggaacgugggucugc

SEQ ID NO: 784 - RNA, 19 nt, Artificial Sequence
  Description of Artificial Sequence:  Synthetic
aagcugcagggagaagagg

SEQ ID NO: 785 - RNA, 19 nt, Artificial Sequence
  Description of Artificial Sequence:  Synthetic
ggggaagccagcaccacaa

SEQ ID NO: 786 - RNA, 19 nt, Artificial Sequence
  Description of Artificial Sequence:  Synthetic
cacuucagacugguugagg

SEQ ID NO: 787 - RNA, 19 nt, Artificial Sequence
  Description of Artificial Sequence:  Synthetic
cccuccgacagaggccagc

SEQ ID NO: 788 - RNA, 19 nt, Artificial Sequence
  Description of Artificial Sequence:  Synthetic
accuccaaugaucaugcuc

SEQ ID NO: 789 - RNA, 19 nt, Artificial Sequence
  Description of Artificial Sequence:  Synthetic
guacagcgaguggucgaua

SEQ ID NO: 790 - RNA, 19 nt, Artificial Sequence
  Description of Artificial Sequence:  Synthetic
auaccagagacugccugug

SEQ ID NO: 791 - RNA, 19 nt, Artificial Sequence
  Description of Artificial Sequence:  Synthetic
cucccgccggaugggugua

SEQ ID NO: 792 - RNA, 19 nt, Artificial Sequence
  Description of Artificial Sequence:  Synthetic
gaugaccucauaauaccac

SEQ ID NO: 793 - RNA, 19 nt, Artificial Sequence
  Description of Artificial Sequence:  Synthetic
gaucuccacccgcacaaug

SEQ ID NO: 794 - RNA, 19 nt, Artificial Sequence
  Description of Artificial Sequence:  Synthetic
uuucagauccuguccauug

SEQ ID NO: 795 - RNA, 19 nt, Artificial Sequence
  Description of Artificial Sequence:  Synthetic
guacuccuugcaguccauu

SEQ ID NO: 796 - RNA, 19 nt, Artificial Sequence
  Description of Artificial Sequence:  Synthetic
aaugcucuugucauaguug

SEQ ID NO: 797 - RNA, 19 nt, Artificial Sequence
  Description of Artificial Sequence:  Synthetic
gguggugccacuguccaca

SEQ ID NO: 798 - RNA, 19 nt, Artificial Sequence
  Description of Artificial Sequence:  Synthetic
cuugggcaaacgaagguug

SEQ ID NO: 799 - RNA, 19 nt, Artificial Sequence
  Description of Artificial Sequence:  Synthetic
ugcagcuucaaacacuuuc

SEQ ID NO: 800 - RNA, 19 nt, Artificial Sequence
  Description of Artificial Sequence:  Synthetic
ugccuugauggauuugacu

SEQ ID NO: 801 - RNA, 19 nt, Artificial Sequence
  Description of Artificial Sequence:  Synthetic
cuucuccguggaggaggcu

SEQ ID NO: 802 - RNA, 19 nt, Artificial Sequence
  Description of Artificial Sequence:  Synthetic
ccagaaaccaucagggaac

SEQ ID NO: 803 - RNA, 19 nt, Artificial Sequence
  Description of Artificial Sequence:  Synthetic
caccagcugcucuccuagc

SEQ ID NO: 804 - RNA, 19 nt, Artificial Sequence
  Description of Artificial Sequence:  Synthetic
ggugccugcuugccagcac

SEQ ID NO: 805 - RNA, 19 nt, Artificial Sequence
  Description of Artificial Sequence:  Synthetic
gaaaauguuccaaggggug

SEQ ID NO: 806 - RNA, 19 nt, Artificial Sequence
  Description of Artificial Sequence:  Synthetic
guagagugagaugacuggg

SEQ ID NO: 807 - RNA, 19 nt, Artificial Sequence
  Description of Artificial Sequence:  Synthetic
gguaaccucacccauuagg

SEQ ID NO: 808 - RNA, 19 nt, Artificial Sequence
  Description of Artificial Sequence:  Synthetic
gaugcggaaggacugguug

SEQ ID NO: 809 - RNA, 19 nt, Artificial Sequence
  Description of Artificial Sequence:  Synthetic
uugcugcggaaggauggug

SEQ ID NO: 810 - RNA, 19 nt, Artificial Sequence
  Description of Artificial Sequence:  Synthetic
uuccacuggccgcagguau

SEQ ID NO: 811 - RNA, 19 nt, Artificial Sequence
  Description of Artificial Sequence:  Synthetic
uugggacguggccacaucu

SEQ ID NO: 812 - RNA, 19 nt, Artificial Sequence
  Description of Artificial Sequence:  Synthetic
aaacuuguaacagucgucu

SEQ ID NO: 813 - RNA, 19 nt, Artificial Sequence
  Description of Artificial Sequence:  Synthetic
ggaugacugugagauggca

SEQ ID NO: 814 - RNA, 19 nt, Artificial Sequence
  Description of Artificial Sequence:  Synthetic
ucccauaacagugcccgug

SEQ ID NO: 815 - RNA, 19 nt, Artificial Sequence
  Description of Artificial Sequence:  Synthetic
gcccuccaugauaacagcu

SEQ ID NO: 816 - RNA, 19 nt, Artificial Sequence
  Description of Artificial Sequence:  Synthetic
aucaaagacaacguagaag

SEQ ID NO: 817 - RNA, 19 nt, Artificial Sequence
  Description of Artificial Sequence:  Synthetic
aauucguuuucgggcccga

SEQ ID NO: 818 - RNA, 19 nt, Artificial Sequence
  Description of Artificial Sequence:  Synthetic
agcgcugacagcaaagcca

SEQ ID NO: 819 - RNA, 19 nt, Artificial Sequence
  Description of Artificial Sequence:  Synthetic
cucaucgugcacauggcaa

SEQ ID NO: 820 - RNA, 19 nt, Artificial Sequence
  Description of Artificial Sequence:  Synthetic
caccgcugccguccugaac

SEQ ID NO: 821 - RNA, 19 nt, Artificial Sequence
  Description of Artificial Sequence:  Synthetic
ggugacaaaagggccuucc

SEQ ID NO: 822 - RNA, 19 nt, Artificial Sequence
  Description of Artificial Sequence:  Synthetic
acagucuuccauguccaag

SEQ ID NO: 823 - RNA, 19 nt, Artificial Sequence
  Description of Artificial Sequence:  Synthetic
cuguggaauguuguagcca

SEQ ID NO: 824 - RNA, 19 nt, Artificial Sequence
  Description of Artificial Sequence:  Synthetic
gaggguugacucaucuguc

SEQ ID NO: 825 - RNA, 19 nt, Artificial Sequence
  Description of Artificial Sequence:  Synthetic
gacauaggcuauggucaug

SEQ ID NO: 826 - RNA, 19 nt, Artificial Sequence
  Description of Artificial Sequence:  Synthetic
ggcgcagauggcagccaug

SEQ ID NO: 827 - RNA, 19 nt, Artificial Sequence
  Description of Artificial Sequence:  Synthetic
gaguggcagcaugaagagg

SEQ ID NO: 828 - RNA, 19 nt, Artificial Sequence
  Description of Artificial Sequence:  Synthetic
cugacacaccaugaggcag

SEQ ID NO: 829 - RNA, 19 nt, Artificial Sequence
  Description of Artificial Sequence:  Synthetic
gcagcggaggcagcgccac

SEQ ID NO: 830 - RNA, 19 nt, Artificial Sequence
  Description of Artificial Sequence:  Synthetic
aucaugcugcuggcgcagg

SEQ ID NO: 831 - RNA, 19 nt, Artificial Sequence
  Description of Artificial Sequence:  Synthetic
gaugucaucagcaaaguca

SEQ ID NO: 832 - RNA, 19 nt, Artificial Sequence
  Description of Artificial Sequence:  Synthetic
uccucacuucagcagggag

SEQ ID NO: 833 - RNA, 19 nt, Artificial Sequence
  Description of Artificial Sequence:  Synthetic
aucuucugcccaugggccu

SEQ ID NO: 834 - RNA, 19 nt, Artificial Sequence
  Description of Artificial Sequence:  Synthetic
ugguccaggggaaucucua

SEQ ID NO: 835 - RNA, 19 nt, Artificial Sequence
  Description of Artificial Sequence:  Synthetic
aagugaaccacggaggugu

SEQ ID NO: 836 - RNA, 19 nt, Artificial Sequence
  Description of Artificial Sequence:  Synthetic
gucuccuacuugugaccaa

SEQ ID NO: 837 - RNA, 19 nt, Artificial Sequence
  Description of Artificial Sequence:  Synthetic
gccacaggugccaucugug

SEQ ID NO: 838 - RNA, 19 nt, Artificial Sequence
  Description of Artificial Sequence:  Synthetic
ggguccugaggugcucugg

SEQ ID NO: 839 - RNA, 19 nt, Artificial Sequence
  Description of Artificial Sequence:  Synthetic
gcauuugguggguggggag

SEQ ID NO: 840 - RNA, 19 nt, Artificial Sequence
  Description of Artificial Sequence:  Synthetic
uucuccaucaaggcagagg

SEQ ID NO: 841 - RNA, 19 nt, Artificial Sequence
  Description of Artificial Sequence:  Synthetic
accuugccagccuuuuccu

SEQ ID NO: 842 - RNA, 19 nt, Artificial Sequence
  Description of Artificial Sequence:  Synthetic
guacagucccuggaaccca

SEQ ID NO: 843 - RNA, 19 nt, Artificial Sequence
  Description of Artificial Sequence:  Synthetic
cuuuucuguuuccuacagg

SEQ ID NO: 844 - RNA, 19 nt, Artificial Sequence
  Description of Artificial Sequence:  Synthetic
agagugcuucuuucuucuc

SEQ ID NO: 845 - RNA, 19 nt, Artificial Sequence
  Description of Artificial Sequence:  Synthetic
aagaguauucccgccagca

SEQ ID NO: 846 - RNA, 19 nt, Artificial Sequence
  Description of Artificial Sequence:  Synthetic
cuuaaauuugaggugacca

SEQ ID NO: 847 - RNA, 19 nt, Artificial Sequence
  Description of Artificial Sequence:  Synthetic
agcagcagaauuucccgac

SEQ ID NO: 848 - RNA, 19 nt, Artificial Sequence
  Description of Artificial Sequence:  Synthetic
uucagggcugaaguuucaa

SEQ ID NO: 849 - RNA, 19 nt, Artificial Sequence
  Description of Artificial Sequence:  Synthetic
aggaaugguggacaaaggu

SEQ ID NO: 850 - RNA, 19 nt, Artificial Sequence
  Description of Artificial Sequence:  Synthetic
uuggguuggagaauuuaaa

SEQ ID NO: 851 - RNA, 19 nt, Artificial Sequence
  Description of Artificial Sequence:  Synthetic
uaagaaaagaagaauacuu

SEQ ID NO: 852 - RNA, 19 nt, Artificial Sequence
  Description of Artificial Sequence:  Synthetic
ugccaguacuucugaaacu

SEQ ID NO: 853 - RNA, 19 nt, Artificial Sequence
  Description of Artificial Sequence:  Synthetic
aagguaaccugcgugugau

SEQ ID NO: 854 - RNA, 19 nt, Artificial Sequence
  Description of Artificial Sequence:  Synthetic
accacagggacacacgcca

SEQ ID NO: 855 - RNA, 19 nt, Artificial Sequence
  Description of Artificial Sequence:  Synthetic
ucucuucucugccagggua

SEQ ID NO: 856 - RNA, 19 nt, Artificial Sequence
  Description of Artificial Sequence:  Synthetic
gcagggaaacaagcuuggu

SEQ ID NO: 857 - RNA, 19 nt, Artificial Sequence
  Description of Artificial Sequence:  Synthetic
uccuacugacuuuggccag

SEQ ID NO: 858 - RNA, 19 nt, Artificial Sequence
  Description of Artificial Sequence:  Synthetic
agcaaacugugcauccucu

SEQ ID NO: 859 - RNA, 19 nt, Artificial Sequence
  Description of Artificial Sequence:  Synthetic
ccugucucuaaagcaaaua

SEQ ID NO: 860 - RNA, 19 nt, Artificial Sequence
  Description of Artificial Sequence:  Synthetic
aggcuuguuuauacagucc

SEQ ID NO: 861 - RNA, 19 nt, Artificial Sequence
  Description of Artificial Sequence:  Synthetic
aaucuuugcaccaauguua

SEQ ID NO: 862 - RNA, 19 nt, Artificial Sequence
  Description of Artificial Sequence:  Synthetic
uuuuuuaauucaagaggca

SEQ ID NO: 863 - RNA, 19 nt, Artificial Sequence
  Description of Artificial Sequence:  Synthetic
auagucaaucuaguuuuuu

SEQ ID NO: 864 - RNA, 19 nt, Artificial Sequence
  Description of Artificial Sequence:  Synthetic
ccgcccccauuuguauaaa

SEQ ID NO: 865 - RNA, 19 nt, Artificial Sequence
  Description of Artificial Sequence:  Synthetic
uccuucuccucuuuccagc

SEQ ID NO: 866 - RNA, 19 nt, Artificial Sequence
  Description of Artificial Sequence:  Synthetic
cugucuuuguacucccucu

SEQ ID NO: 867 - RNA, 19 nt, Artificial Sequence
  Description of Artificial Sequence:  Synthetic
cuuugaucccacuauuccc

SEQ ID NO: 868 - RNA, 19 nt, Artificial Sequence
  Description of Artificial Sequence:  Synthetic
uguuucugccuuuccuagc

SEQ ID NO: 869 - RNA, 19 nt, Artificial Sequence
  Description of Artificial Sequence:  Synthetic
aggacuggugagugguugu

SEQ ID NO: 870 - RNA, 19 nt, Artificial Sequence
  Description of Artificial Sequence:  Synthetic
gagaugaggucuaaaacua

SEQ ID NO: 871 - RNA, 19 nt, Artificial Sequence
  Description of Artificial Sequence:  Synthetic
agaugggaugcuaucuugg

SEQ ID NO: 872 - RNA, 19 nt, Artificial Sequence
  Description of Artificial Sequence:  Synthetic
aacaacacccaucuucuga

SEQ ID NO: 873 - RNA, 19 nt, Artificial Sequence
  Description of Artificial Sequence:  Synthetic
agaaaagaaaacauugaaa

SEQ ID NO: 874 - RNA, 19 nt, Artificial Sequence
  Description of Artificial Sequence:  Synthetic
uggucaggcugcaaccaca

SEQ ID NO: 875 - RNA, 19 nt, Artificial Sequence
  Description of Artificial Sequence:  Synthetic
cccuucccaucucacuuuu

SEQ ID NO: 876 - RNA, 19 nt, Artificial Sequence
  Description of Artificial Sequence:  Synthetic
gcucuuuggcuagauaagc

SEQ ID NO: 877 - RNA, 19 nt, Artificial Sequence
  Description of Artificial Sequence:  Synthetic
uaagagagcuaaaaaagag

SEQ ID NO: 878 - RNA, 19 nt, Artificial Sequence
  Description of Artificial Sequence:  Synthetic
cuuagugggcacuucauuu

SEQ ID NO: 879 - RNA, 19 nt, Artificial Sequence
  Description of Artificial Sequence:  Synthetic
auguguuaaguggaacuuc

SEQ ID NO: 880 - RNA, 19 nt, Artificial Sequence
  Description of Artificial Sequence:  Synthetic
uuaauauggcagaaauuca

SEQ ID NO: 881 - RNA, 19 nt, Artificial Sequence
  Description of Artificial Sequence:  Synthetic
cagauagagacaaugaaau

SEQ ID NO: 882 - RNA, 19 nt, Artificial Sequence
  Description of Artificial Sequence:  Synthetic
guagaauaaagggugguuc

SEQ ID NO: 883 - RNA, 19 nt, Artificial Sequence
  Description of Artificial Sequence:  Synthetic
cagugcugccuaucauaug

SEQ ID NO: 884 - RNA, 19 nt, Artificial Sequence
  Description of Artificial Sequence:  Synthetic
uaggggguuaggauauuuc

SEQ ID NO: 885 - RNA, 19 nt, Artificial Sequence
  Description of Artificial Sequence:  Synthetic
cacagggcaccuggagcuu

SEQ ID NO: 886 - RNA, 19 nt, Artificial Sequence
  Description of Artificial Sequence:  Synthetic
auaguccaguugcucuccc

SEQ ID NO: 887 - RNA, 19 nt, Artificial Sequence
  Description of Artificial Sequence:  Synthetic
acagagcccagcccugcua

SEQ ID NO: 888 - RNA, 19 nt, Artificial Sequence
  Description of Artificial Sequence:  Synthetic
gagccuaugaccaggaaga

SEQ ID NO: 889 - RNA, 19 nt, Artificial Sequence
  Description of Artificial Sequence:  Synthetic
agauuugggggaaagagug

SEQ ID NO: 890 - RNA, 19 nt, Artificial Sequence
  Description of Artificial Sequence:  Synthetic
cugcaaagcuccagaggaa

SEQ ID NO: 891 - RNA, 19 nt, Artificial Sequence
  Description of Artificial Sequence:  Synthetic
uuccuuuuagcaccuuggc

SEQ ID NO: 892 - RNA, 19 nt, Artificial Sequence
  Description of Artificial Sequence:  Synthetic
gaagaggucuccuaccuau

SEQ ID NO: 893 - RNA, 19 nt, Artificial Sequence
  Description of Artificial Sequence:  Synthetic
gcuuuuaaggauuagauag

SEQ ID NO: 894 - RNA, 19 nt, Artificial Sequence
  Description of Artificial Sequence:  Synthetic
augaauguucaacauuaug

SEQ ID NO: 895 - RNA, 19 nt, Artificial Sequence
  Description of Artificial Sequence:  Synthetic
uagggcaucagcuguugaa

SEQ ID NO: 896 - RNA, 19 nt, Artificial Sequence
  Description of Artificial Sequence:  Synthetic
aaauccaggcagggguuau

SEQ ID NO: 897 - RNA, 19 nt, Artificial Sequence
  Description of Artificial Sequence:  Synthetic
uuauagccuaauaggaaga

SEQ ID NO: 898 - RNA, 19 nt, Artificial Sequence
  Description of Artificial Sequence:  Synthetic
uaaagaucuugcuacuucu

SEQ ID NO: 899 - RNA, 19 nt, Artificial Sequence
  Description of Artificial Sequence:  Synthetic
aaaccacucugaauuaugu

SEQ ID NO: 900 - RNA, 19 nt, Artificial Sequence
  Description of Artificial Sequence:  Synthetic
gaggguaggaaggcaauga

SEQ ID NO: 901 - RNA, 19 nt, Artificial Sequence
  Description of Artificial Sequence:  Synthetic
aauggaggggccauuagag

SEQ ID NO: 902 - RNA, 19 nt, Artificial Sequence
  Description of Artificial Sequence:  Synthetic
ugaugcuuuagucaaauaa

SEQ ID NO: 903 - RNA, 19 nt, Artificial Sequence
  Description of Artificial Sequence:  Synthetic
aaugcuagugccacugugu

SEQ ID NO: 904 - RNA, 19 nt, Artificial Sequence
  Description of Artificial Sequence:  Synthetic
uucucauacucuugguaua

SEQ ID NO: 905 - RNA, 19 nt, Artificial Sequence
  Description of Artificial Sequence:  Synthetic
agccauaaagcacuguauu

SEQ ID NO: 906 - RNA, 19 nt, Artificial Sequence
  Description of Artificial Sequence:  Synthetic
ugaaggcaguaauguuaga

SEQ ID NO: 907 - RNA, 19 nt, Artificial Sequence
  Description of Artificial Sequence:  Synthetic
uccaggcagccuugauacu

SEQ ID NO: 908 - RNA, 19 nt, Artificial Sequence
  Description of Artificial Sequence:  Synthetic
ugaggcugccauccuuucu

SEQ ID NO: 909 - RNA, 19 nt, Artificial Sequence
  Description of Artificial Sequence:  Synthetic
gaggacauaaggaagcccu

SEQ ID NO: 910 - RNA, 19 nt, Artificial Sequence
  Description of Artificial Sequence:  Synthetic
caaggagcucuuguggugg

SEQ ID NO: 911 - RNA, 19 nt, Artificial Sequence
  Description of Artificial Sequence:  Synthetic
gaaaaagaugaccuucauc

SEQ ID NO: 912 - RNA, 19 nt, Artificial Sequence
  Description of Artificial Sequence:  Synthetic
gggaagaacaggauagggg

SEQ ID NO: 913 - RNA, 19 nt, Artificial Sequence
  Description of Artificial Sequence:  Synthetic
accauuaggagcggggagg

SEQ ID NO: 914 - RNA, 19 nt, Artificial Sequence
  Description of Artificial Sequence:  Synthetic
cagccuggguacccacgua

SEQ ID NO: 915 - RNA, 19 nt, Artificial Sequence
  Description of Artificial Sequence:  Synthetic
acuaccuagcccaagaacc

SEQ ID NO: 916 - RNA, 19 nt, Artificial Sequence
  Description of Artificial Sequence:  Synthetic
guaaugaacuuggucccca

SEQ ID NO: 917 - RNA, 19 nt, Artificial Sequence
  Description of Artificial Sequence:  Synthetic
gcuagaacugauagggagg

SEQ ID NO: 918 - RNA, 19 nt, Artificial Sequence
  Description of Artificial Sequence:  Synthetic
gguaccguaguuuacuaug

SEQ ID NO: 919 - RNA, 19 nt, Artificial Sequence
  Description of Artificial Sequence:  Synthetic
gcucuucccacuaacacug

SEQ ID NO: 920 - RNA, 19 nt, Artificial Sequence
  Description of Artificial Sequence:  Synthetic
guauacuaggaaaacccag

SEQ ID NO: 921 - RNA, 19 nt, Artificial Sequence
  Description of Artificial Sequence:  Synthetic
aggaguaggaugcaguggg

SEQ ID NO: 922 - RNA, 19 nt, Artificial Sequence
  Description of Artificial Sequence:  Synthetic
gcagcggguugaccaggua

SEQ ID NO: 923 - RNA, 19 nt, Artificial Sequence
  Description of Artificial Sequence:  Synthetic
caggucccauaccuggaag

SEQ ID NO: 924 - RNA, 19 nt, Artificial Sequence
  Description of Artificial Sequence:  Synthetic
agguaauuccacacuuagc

SEQ ID NO: 925 - RNA, 19 nt, Artificial Sequence
  Description of Artificial Sequence:  Synthetic
auuucccucucccuuauca

SEQ ID NO: 926 - RNA, 19 nt, Artificial Sequence
  Description of Artificial Sequence:  Synthetic
accagaggcccuccuugua

SEQ ID NO: 927 - RNA, 19 nt, Artificial Sequence
  Description of Artificial Sequence:  Synthetic
cuggcugaggccaggaaca

SEQ ID NO: 928 - RNA, 19 nt, Artificial Sequence
  Description of Artificial Sequence:  Synthetic
uuuauggcuugugggcagc

SEQ ID NO: 929 - RNA, 19 nt, Artificial Sequence
  Description of Artificial Sequence:  Synthetic
guauucuuguuuuauuggu

SEQ ID NO: 930 - RNA, 19 nt, Artificial Sequence
  Description of Artificial Sequence:  Synthetic
agauaaaaaacugacucag

SEQ ID NO: 931 - RNA, 19 nt, Artificial Sequence
  Description of Artificial Sequence:  Synthetic
ugggaaugaagagaaccca

SEQ ID NO: 932 - RNA, 19 nt, Artificial Sequence
  Description of Artificial Sequence:  Synthetic
aagcagcaccaagugcagu

SEQ ID NO: 933 - RNA, 19 nt, Artificial Sequence
  Description of Artificial Sequence:  Synthetic
gguguucccagucagccaa

SEQ ID NO: 934 - RNA, 19 nt, Artificial Sequence
  Description of Artificial Sequence:  Synthetic
cagacucuguaguuauggg

SEQ ID NO: 935 - RNA, 19 nt, Artificial Sequence
  Description of Artificial Sequence:  Synthetic
agucuccagucuuccuguc

SEQ ID NO: 936 - RNA, 19 nt, Artificial Sequence
  Description of Artificial Sequence:  Synthetic
uccgagcuagaaguggaca

SEQ ID NO: 937 - RNA, 19 nt, Artificial Sequence
  Description of Artificial Sequence:  Synthetic
uuuauuuacacaguaaguu

SEQ ID NO: 938 - RNA, 19 nt, Artificial Sequence
  Description of Artificial Sequence:  Synthetic
ugguagcaguucugaaagu

SEQ ID NO: 939 - RNA, 19 nt, Artificial Sequence
  Description of Artificial Sequence:  Synthetic
uguggcauuuucacuucau

SEQ ID NO: 940 - RNA, 19 nt, Artificial Sequence
  Description of Artificial Sequence:  Synthetic
agaaauuauaaagcaaaau

SEQ ID NO: 941 - RNA, 19 nt, Artificial Sequence
  Description of Artificial Sequence:  Synthetic
guuuuucccaacaugggua

SEQ ID NO: 942 - RNA, 19 nt, Artificial Sequence
  Description of Artificial Sequence:  Synthetic
agggcugggaaaaagccag

SEQ ID NO: 943 - RNA, 19 nt, Artificial Sequence
  Description of Artificial Sequence:  Synthetic
gaguuuuaugcccuggaaa

SEQ ID NO: 944 - RNA, 19 nt, Artificial Sequence
  Description of Artificial Sequence:  Synthetic
cuugcuaucgaagggguug

SEQ ID NO: 945 - RNA, 19 nt, Artificial Sequence
  Description of Artificial Sequence:  Synthetic
aauaauaggcugaugggac

SEQ ID NO: 946 - RNA, 19 nt, Artificial Sequence
  Description of Artificial Sequence:  Synthetic
gcaaguuuucuuuaaaaaa

SEQ ID NO: 947 - RNA, 19 nt, Artificial Sequence
  Description of Artificial Sequence:  Synthetic
guaaaaagaaaaacaagug

SEQ ID NO: 948 - RNA, 19 nt, Artificial Sequence
  Description of Artificial Sequence:  Synthetic
ggcaggaaggaaguaacug

SEQ ID NO: 949 - RNA, 19 nt, Artificial Sequence
  Description of Artificial Sequence:  Synthetic
uagaguuuauaauuuuggg

SEQ ID NO: 950 - RNA, 19 nt, Artificial Sequence
  Description of Artificial Sequence:  Synthetic
aagacuuuuuuuuacacuu

SEQ ID NO: 951 - RNA, 19 nt, Artificial Sequence
  Description of Artificial Sequence:  Synthetic
aagcaagaagcuguuguua

SEQ ID NO: 952 - RNA, 19 nt, Artificial Sequence
  Description of Artificial Sequence:  Synthetic
uauaauacauauuuuuaca

SEQ ID NO: 953 - RNA, 19 nt, Artificial Sequence
  Description of Artificial Sequence:  Synthetic
aauuuaaaaauacagaugu

SEQ ID NO: 954 - RNA, 19 nt, Artificial Sequence
  Description of Artificial Sequence:  Synthetic
gucauuuuucaggagcaga

SEQ ID NO: 955 - RNA, 19 nt, Artificial Sequence
  Description of Artificial Sequence:  Synthetic
ugaguggagaaugggacag

SEQ ID NO: 956 - RNA, 19 nt, Artificial Sequence
  Description of Artificial Sequence:  Synthetic
gaaaggccccaaaugcagu

SEQ ID NO: 957 - RNA, 19 nt, Artificial Sequence
  Description of Artificial Sequence:  Synthetic
agacaugcagaccaauggg

SEQ ID NO: 958 - RNA, 19 nt, Artificial Sequence
  Description of Artificial Sequence:  Synthetic
cuggccugcaaugauaaaa

SEQ ID NO: 959 - RNA, 19 nt, Artificial Sequence
  Description of Artificial Sequence:  Synthetic
cccuucucccucuguccac

SEQ ID NO: 960 - RNA, 19 nt, Artificial Sequence
  Description of Artificial Sequence:  Synthetic
guuggcgaccccuguucuc

SEQ ID NO: 961 - RNA, 19 nt, Artificial Sequence
  Description of Artificial Sequence:  Synthetic
ucagaaagcaacacaagug

SEQ ID NO: 962 - RNA, 19 nt, Artificial Sequence
  Description of Artificial Sequence:  Synthetic
uuucuuguucaggaucagu

SEQ ID NO: 963 - RNA, 19 nt, Artificial Sequence
  Description of Artificial Sequence:  Synthetic
agcgccucaguguuacucu

SEQ ID NO: 964 - RNA, 19 nt, Artificial Sequence
  Description of Artificial Sequence:  Synthetic
gaguugugcaugggagcga

SEQ ID NO: 965 - RNA, 19 nt, Artificial Sequence
  Description of Artificial Sequence:  Synthetic
gaggauaaguguuuuggag

SEQ ID NO: 966 - RNA, 19 nt, Artificial Sequence
  Description of Artificial Sequence:  Synthetic
gaaagcccacucuugcagg

SEQ ID NO: 967 - RNA, 19 nt, Artificial Sequence
  Description of Artificial Sequence:  Synthetic
uucccaguaaagacccugg

SEQ ID NO: 968 - RNA, 19 nt, Artificial Sequence
  Description of Artificial Sequence:  Synthetic
aggagggggcuuaacugcu

SEQ ID NO: 969 - RNA, 19 nt, Artificial Sequence
  Description of Artificial Sequence:  Synthetic
agaaaaaaggaagggguga

SEQ ID NO: 970 - RNA, 19 nt, Artificial Sequence
  Description of Artificial Sequence:  Synthetic
agccaaaggaguaaagaaa

SEQ ID NO: 971 - RNA, 19 nt, Artificial Sequence
  Description of Artificial Sequence:  Synthetic
uuuuccaaaauccuuugaa

SEQ ID NO: 972 - RNA, 19 nt, Artificial Sequence
  Description of Artificial Sequence:  Synthetic
uguaaagcauauuguuucu

SEQ ID NO: 973 - RNA, 19 nt, Artificial Sequence
  Description of Artificial Sequence:  Synthetic
uuagaaauugaaaaugagu

SEQ ID NO: 974 - RNA, 19 nt, Artificial Sequence
  Description of Artificial Sequence:  Synthetic
ucaguauccccugcaaauu

SEQ ID NO: 975 - RNA, 19 nt, Artificial Sequence
  Description of Artificial Sequence:  Synthetic
ggccaccugccguauuuuu

SEQ ID NO: 976 - RNA, 19 nt, Artificial Sequence
  Description of Artificial Sequence:  Synthetic
aacuuuacagcagccuuag

SEQ ID NO: 977 - RNA, 19 nt, Artificial Sequence
  Description of Artificial Sequence:  Synthetic
aagauuuccucuccccuca

SEQ ID NO: 978 - RNA, 19 nt, Artificial Sequence
  Description of Artificial Sequence:  Synthetic
uuuuuaucuuguaaucuua

SEQ ID NO: 979 - RNA, 19 nt, Artificial Sequence
  Description of Artificial Sequence:  Synthetic
uuuguuuaggggauucguu

SEQ ID NO: 980 - RNA, 19 nt, Artificial Sequence
  Description of Artificial Sequence:  Synthetic
accaguucuauuguucuuu

SEQ ID NO: 981 - RNA, 19 nt, Artificial Sequence
  Description of Artificial Sequence:  Synthetic
aagguggcaaaauggaaga

SEQ ID NO: 982 - RNA, 19 nt, Artificial Sequence
  Description of Artificial Sequence:  Synthetic
uagcugucaugaacaggaa

SEQ ID NO: 983 - RNA, 19 nt, Artificial Sequence
  Description of Artificial Sequence:  Synthetic
uuacugucuccagguuagu

SEQ ID NO: 984 - RNA, 19 nt, Artificial Sequence
  Description of Artificial Sequence:  Synthetic
ucuuugguuaaugaaaugu

SEQ ID NO: 985 - RNA, 19 nt, Artificial Sequence
  Description of Artificial Sequence:  Synthetic
aggucaggugacccacuuu

SEQ ID NO: 986 - RNA, 19 nt, Artificial Sequence
  Description of Artificial Sequence:  Synthetic
gaguacucagcucuucaga

SEQ ID NO: 987 - RNA, 19 nt, Artificial Sequence
  Description of Artificial Sequence:  Synthetic
gggugauuggaguggccug

SEQ ID NO: 988 - RNA, 19 nt, Artificial Sequence
  Description of Artificial Sequence:  Synthetic
ccuccuuggcaucuuguag

SEQ ID NO: 989 - RNA, 19 nt, Artificial Sequence
  Description of Artificial Sequence:  Synthetic
gagcuggacuuccugggac

SEQ ID NO: 990 - RNA, 19 nt, Artificial Sequence
  Description of Artificial Sequence:  Synthetic
gacuagcgucaguuuaagg

SEQ ID NO: 991 - RNA, 19 nt, Artificial Sequence
  Description of Artificial Sequence:  Synthetic
cacuugcccagguuuauug

SEQ ID NO: 992 - RNA, 19 nt, Artificial Sequence
  Description of Artificial Sequence:  Synthetic
uccucauuucucuugccuc

SEQ ID NO: 993 - RNA, 19 nt, Artificial Sequence
  Description of Artificial Sequence:  Synthetic
accucacagauggauucuu

SEQ ID NO: 994 - RNA, 19 nt, Artificial Sequence
  Description of Artificial Sequence:  Synthetic
cuuucauccuugccuguca

SEQ ID NO: 995 - RNA, 19 nt, Artificial Sequence
  Description of Artificial Sequence:  Synthetic
acucuuuuccuucuuuguc

SEQ ID NO: 996 - RNA, 19 nt, Artificial Sequence
  Description of Artificial Sequence:  Synthetic
cuccuuucugccuuugaua

SEQ ID NO: 997 - RNA, 19 nt, Artificial Sequence
  Description of Artificial Sequence:  Synthetic
cagacccaacuaaaugauc

SEQ ID NO: 998 - RNA, 19 nt, Artificial Sequence
  Description of Artificial Sequence:  Synthetic
agcaaagacuuuuccuuuc

SEQ ID NO: 999 - RNA, 19 nt, Artificial Sequence
  Description of Artificial Sequence:  Synthetic
uagcaguacaugucggaua

SEQ ID NO: 1000 - RNA, 19 nt, Artificial Sequence
  Description of Artificial Sequence:  Synthetic
uaaaaugcuuacagguacu

SEQ ID NO: 1001 - RNA, 19 nt, Artificial Sequence
  Description of Artificial Sequence:  Synthetic
uuuuuccauucugggaccu

SEQ ID NO: 1002 - RNA, 19 nt, Artificial Sequence
  Description of Artificial Sequence:  Synthetic
uuaccaauagcugauuuuu

SEQ ID NO: 1003 - RNA, 19 nt, Artificial Sequence
  Description of Artificial Sequence:  Synthetic
ggaaaggacauuauuauau

SEQ ID NO: 1004 - RNA, 19 nt, Artificial Sequence
  Description of Artificial Sequence:  Synthetic
uaaaaaaacugacuccagg

SEQ ID NO: 1005 - RNA, 19 nt, Artificial Sequence
  Description of Artificial Sequence:  Synthetic
aacuaagaguuaacuuuuu

SEQ ID NO: 1006 - RNA, 19 nt, Artificial Sequence
  Description of Artificial Sequence:  Synthetic
uagaauuaaacaaguaaaa

SEQ ID NO: 1007 - RNA, 19 nt, Artificial Sequence
  Description of Artificial Sequence:  Synthetic
cucagcucccuucucuuuu

SEQ ID NO: 1008 - RNA, 19 nt, Artificial Sequence
  Description of Artificial Sequence:  Synthetic
acuccuacagggaauggcc

SEQ ID NO: 1009 - RNA, 19 nt, Artificial Sequence
  Description of Artificial Sequence:  Synthetic
uccuauccuuuuaucuuua

SEQ ID NO: 1010 - RNA, 19 nt, Artificial Sequence
  Description of Artificial Sequence:  Synthetic
uuagagcuuugaaucuuuu

SEQ ID NO: 1011 - RNA, 19 nt, Artificial Sequence
  Description of Artificial Sequence:  Synthetic
gggaaagcugugacucuau

SEQ ID NO: 1012 - RNA, 19 nt, Artificial Sequence
  Description of Artificial Sequence:  Synthetic
auuuuagguuuuauaccug

SEQ ID NO: 1013 - RNA, 19 nt, Artificial Sequence
  Description of Artificial Sequence:  Synthetic
ugcuuauuguacuucuuaa

SEQ ID NO: 1014 - RNA, 19 nt, Artificial Sequence
  Description of Artificial Sequence:  Synthetic
uagaucauuuuccaccucu

SEQ ID NO: 1015 - RNA, 19 nt, Artificial Sequence
  Description of Artificial Sequence:  Synthetic
uggguagcuaucaggaacu

SEQ ID NO: 1016 - RNA, 19 nt, Artificial Sequence
  Description of Artificial Sequence:  Synthetic
uauaaaucacuugcucugu

SEQ ID NO: 1017 - RNA, 19 nt, Artificial Sequence
  Description of Artificial Sequence:  Synthetic
uaguuuggauuucaaauuu

SEQ ID NO: 1018 - RNA, 19 nt, Artificial Sequence
  Description of Artificial Sequence:  Synthetic
aaagugauauuaagaaagu

SEQ ID NO: 1019 - RNA, 19 nt, Artificial Sequence
  Description of Artificial Sequence:  Synthetic
cugggaaaaauggagacca

SEQ ID NO: 1020 - RNA, 19 nt, Artificial Sequence
  Description of Artificial Sequence:  Synthetic
ggggacauauuuccugucc

SEQ ID NO: 1021 - RNA, 19 nt, Artificial Sequence
  Description of Artificial Sequence:  Synthetic
gaagcaagaaaguuagggg

SEQ ID NO: 1022 - RNA, 19 nt, Artificial Sequence
  Description of Artificial Sequence:  Synthetic
ugcuggauuuuaauuuuug

SEQ ID NO: 1023 - RNA, 19 nt, Artificial Sequence
  Description of Artificial Sequence:  Synthetic
uguagaaugaucuugggau

SEQ ID NO: 1024 - RNA, 19 nt, Artificial Sequence
  Description of Artificial Sequence:  Synthetic
ugucugugcaaaauuacuu

SEQ ID NO: 1025 - RNA, 19 nt, Artificial Sequence
  Description of Artificial Sequence:  Synthetic
ggcacuggggugaggagau

SEQ ID NO: 1026 - RNA, 19 nt, Artificial Sequence
  Description of Artificial Sequence:  Synthetic
uugggugagcuccagacag

SEQ ID NO: 1027 - RNA, 19 nt, Artificial Sequence
  Description of Artificial Sequence:  Synthetic
ccaaguuguuuggugaccu

SEQ ID NO: 1028 - RNA, 19 nt, Artificial Sequence
  Description of Artificial Sequence:  Synthetic
aaggcaguugguucacaac

SEQ ID NO: 1029 - RNA, 19 nt, Artificial Sequence
  Description of Artificial Sequence:  Synthetic
ccccucccccagaagguua

SEQ ID NO: 1030 - RNA, 19 nt, Artificial Sequence
  Description of Artificial Sequence:  Synthetic
cuccuagucuagcuaaucc

SEQ ID NO: 1031 - RNA, 19 nt, Artificial Sequence
  Description of Artificial Sequence:  Synthetic
uucccauucacuucugguc

SEQ ID NO: 1032 - RNA, 19 nt, Artificial Sequence
  Description of Artificial Sequence:  Synthetic
uugugaaguccucacccuu

SEQ ID NO: 1033 - RNA, 19 nt, Artificial Sequence
  Description of Artificial Sequence:  Synthetic
agcucugacaggccaacau

SEQ ID NO: 1034 - RNA, 19 nt, Artificial Sequence
  Description of Artificial Sequence:  Synthetic
ugucuuggcuucuaaucaa

SEQ ID NO: 1035 - RNA, 19 nt, Artificial Sequence
  Description of Artificial Sequence:  Synthetic
gucuuccuuugcugccacu

SEQ ID NO: 1036 - RNA, 19 nt, Artificial Sequence
  Description of Artificial Sequence:  Synthetic
agguuuuuccugggccaag

SEQ ID NO: 1037 - RNA, 19 nt, Artificial Sequence
  Description of Artificial Sequence:  Synthetic
gaaauuagcacaacccaca

SEQ ID NO: 1038 - RNA, 19 nt, Artificial Sequence
  Description of Artificial Sequence:  Synthetic
cacccuauuuucuggacag

SEQ ID NO: 1039 - RNA, 19 nt, Artificial Sequence
  Description of Artificial Sequence:  Synthetic
accccacaagcuucugucc

SEQ ID NO: 1040 - RNA, 19 nt, Artificial Sequence
  Description of Artificial Sequence:  Synthetic
gucccaauuccuccaugca

SEQ ID NO: 1041 - RNA, 19 nt, Artificial Sequence
  Description of Artificial Sequence:  Synthetic
gaauaacaacauaaccagg

SEQ ID NO: 1042 - RNA, 19 nt, Artificial Sequence
  Description of Artificial Sequence:  Synthetic
ccaaaauucacaguccgag

SEQ ID NO: 1043 - RNA, 19 nt, Artificial Sequence
  Description of Artificial Sequence:  Synthetic
auauucuguuuuacaucac

SEQ ID NO: 1044 - RNA, 19 nt, Artificial Sequence
  Description of Artificial Sequence:  Synthetic
agacauuagguuuacagaa

SEQ ID NO: 1045 - RNA, 19 nt, Artificial Sequence
  Description of Artificial Sequence:  Synthetic
aacgcucauuauuuauaca

SEQ ID NO: 1046 - RNA, 19 nt, Artificial Sequence
  Description of Artificial Sequence:  Synthetic
ugaauauuuuacuguguua

SEQ ID NO: 1047 - RNA, 19 nt, Artificial Sequence
  Description of Artificial Sequence:  Synthetic
uuuuuuuugacuucuuauu

SEQ ID NO: 1048 - RNA, 19 nt, Artificial Sequence
  Description of Artificial Sequence:  Synthetic
uuuuuuuuuuuuuugacuu

SEQ ID NO: 1049 - RNA, 19 nt, Artificial Sequence
  Description of Artificial Sequence:  Synthetic
gacagaguuaccugcaccg

SEQ ID NO: 1050 - RNA, 19 nt, Artificial Sequence
  Description of Artificial Sequence:  Synthetic
guuguccuacuuccagaau

SEQ ID NO: 1051 - RNA, 19 nt, Artificial Sequence
  Description of Artificial Sequence:  Synthetic
ugcacagaugucugaggac

SEQ ID NO: 1052 - RNA, 19 nt, Artificial Sequence
  Description of Artificial Sequence:  Synthetic
caaccaccugagcaauacu

SEQ ID NO: 1053 - RNA, 19 nt, Artificial Sequence
  Description of Artificial Sequence:  Synthetic
uaaugacaauagagaacgg

SEQ ID NO: 1054 - RNA, 19 nt, Artificial Sequence
  Description of Artificial Sequence:  Synthetic
gcaggagcacaacgacaga

SEQ ID NO: 1055 - RNA, 19 nt, Artificial Sequence
  Description of Artificial Sequence:  Synthetic
acggagccuuggccacccu

SEQ ID NO: 1056 - RNA, 19 nt, Artificial Sequence
  Description of Artificial Sequence:  Synthetic
ugagccauuaucuaaugga

SEQ ID NO: 1057 - RNA, 19 nt, Artificial Sequence
  Description of Artificial Sequence:  Synthetic
acgaccccaggguaacucc

SEQ ID NO: 1058 - RNA, 19 nt, Artificial Sequence
  Description of Artificial Sequence:  Synthetic
ccggcaggugguggagcaa

SEQ ID NO: 1059 - RNA, 19 nt, Artificial Sequence
  Description of Artificial Sequence:  Synthetic
agaugaggaagaagaugag

SEQ ID NO: 1060 - RNA, 19 nt, Artificial Sequence
  Description of Artificial Sequence:  Synthetic
ggagcugacauugaaauau

SEQ ID NO: 1061 - RNA, 19 nt, Artificial Sequence
  Description of Artificial Sequence:  Synthetic
uggcgccaagcaugugauc

SEQ ID NO: 1062 - RNA, 19 nt, Artificial Sequence
  Description of Artificial Sequence:  Synthetic
caugcucuuugucccugug

SEQ ID NO: 1063 - RNA, 19 nt, Artificial Sequence
  Description of Artificial Sequence:  Synthetic
gacucucugcaugguggug

SEQ ID NO: 1064 - RNA, 19 nt, Artificial Sequence
  Description of Artificial Sequence:  Synthetic
ggucguggcuaccauuaag

SEQ ID NO: 1065 - RNA, 19 nt, Artificial Sequence
  Description of Artificial Sequence:  Synthetic
gucagucagcuuuuauacc

SEQ ID NO: 1066 - RNA, 19 nt, Artificial Sequence
  Description of Artificial Sequence:  Synthetic
ccggaaggaugggcagcua

SEQ ID NO: 1067 - RNA, 19 nt, Artificial Sequence
  Description of Artificial Sequence:  Synthetic
aaucuauaccccauucaca

SEQ ID NO: 1068 - RNA, 19 nt, Artificial Sequence
  Description of Artificial Sequence:  Synthetic
agaagauaccgagacugug

SEQ ID NO: 1069 - RNA, 19 nt, Artificial Sequence
  Description of Artificial Sequence:  Synthetic
gggccagagagcccugcac

SEQ ID NO: 1070 - RNA, 19 nt, Artificial Sequence
  Description of Artificial Sequence:  Synthetic
cucaauucugaaugcugcc

SEQ ID NO: 1071 - RNA, 19 nt, Artificial Sequence
  Description of Artificial Sequence:  Synthetic
caucaugaucagugucauu

SEQ ID NO: 1072 - RNA, 19 nt, Artificial Sequence
  Description of Artificial Sequence:  Synthetic
uguugucaugacuauccuc

SEQ ID NO: 1073 - RNA, 19 nt, Artificial Sequence
  Description of Artificial Sequence:  Synthetic
ccuggugguucuguauaaa

SEQ ID NO: 1074 - RNA, 19 nt, Artificial Sequence
  Description of Artificial Sequence:  Synthetic
auacaggugcuauaagguc

SEQ ID NO: 1075 - RNA, 19 nt, Artificial Sequence
  Description of Artificial Sequence:  Synthetic
cauccaugccuggcuuauu

SEQ ID NO: 1076 - RNA, 19 nt, Artificial Sequence
  Description of Artificial Sequence:  Synthetic
uauaucaucucuauuguug

SEQ ID NO: 1077 - RNA, 19 nt, Artificial Sequence
  Description of Artificial Sequence:  Synthetic
gcuguucuuuuuuucauuc

SEQ ID NO: 1078 - RNA, 19 nt, Artificial Sequence
  Description of Artificial Sequence:  Synthetic
cauuuacuugggggaagug

SEQ ID NO: 1079 - RNA, 19 nt, Artificial Sequence
  Description of Artificial Sequence:  Synthetic
guuuaaaaccuauaacguu

SEQ ID NO: 1080 - RNA, 19 nt, Artificial Sequence
  Description of Artificial Sequence:  Synthetic
ugcuguggacuacauuacu

SEQ ID NO: 1081 - RNA, 19 nt, Artificial Sequence
  Description of Artificial Sequence:  Synthetic
uguugcacuccugaucugg

SEQ ID NO: 1082 - RNA, 19 nt, Artificial Sequence
  Description of Artificial Sequence:  Synthetic
gaauuuuggugugguggga

SEQ ID NO: 1083 - RNA, 19 nt, Artificial Sequence
  Description of Artificial Sequence:  Synthetic
aaugauuuccauucacugg

SEQ ID NO: 1084 - RNA, 19 nt, Artificial Sequence
  Description of Artificial Sequence:  Synthetic
gaaagguccacuucgacuc

SEQ ID NO: 1085 - RNA, 19 nt, Artificial Sequence
  Description of Artificial Sequence:  Synthetic
ccagcaggcauaucucauu

SEQ ID NO: 1086 - RNA, 19 nt, Artificial Sequence
  Description of Artificial Sequence:  Synthetic
uaugauuagugcccucaug

SEQ ID NO: 1087 - RNA, 19 nt, Artificial Sequence
  Description of Artificial Sequence:  Synthetic
ggcccugguguuuaucaag

SEQ ID NO: 1088 - RNA, 19 nt, Artificial Sequence
  Description of Artificial Sequence:  Synthetic
guaccucccugaauggacu

SEQ ID NO: 1089 - RNA, 19 nt, Artificial Sequence
  Description of Artificial Sequence:  Synthetic
ugcguggcucaucuuggcu

SEQ ID NO: 1090 - RNA, 19 nt, Artificial Sequence
  Description of Artificial Sequence:  Synthetic
ugugauuucgguauaugau

SEQ ID NO: 1091 - RNA, 19 nt, Artificial Sequence
  Description of Artificial Sequence:  Synthetic
uuuaguggcuguuuugugu

SEQ ID NO: 1092 - RNA, 19 nt, Artificial Sequence
  Description of Artificial Sequence:  Synthetic
uccgaaagguccacuucgu

SEQ ID NO: 1093 - RNA, 19 nt, Artificial Sequence
  Description of Artificial Sequence:  Synthetic
uaugcugguugaaacagcu

SEQ ID NO: 1094 - RNA, 19 nt, Artificial Sequence
  Description of Artificial Sequence:  Synthetic
ucaggagagaaaugaaacg

SEQ ID NO: 1095 - RNA, 19 nt, Artificial Sequence
  Description of Artificial Sequence:  Synthetic
gcuuuuuccagcucucauu

SEQ ID NO: 1096 - RNA, 19 nt, Artificial Sequence
  Description of Artificial Sequence:  Synthetic
uuacuccucaacaauggug

SEQ ID NO: 1097 - RNA, 19 nt, Artificial Sequence
  Description of Artificial Sequence:  Synthetic
gugguuggugaauauggca

SEQ ID NO: 1098 - RNA, 19 nt, Artificial Sequence
  Description of Artificial Sequence:  Synthetic
agaaggagacccggaagcu

SEQ ID NO: 1099 - RNA, 19 nt, Artificial Sequence
  Description of Artificial Sequence:  Synthetic
ucaaaggagaguauccaaa

SEQ ID NO: 1100 - RNA, 19 nt, Artificial Sequence
  Description of Artificial Sequence:  Synthetic
aaauuccaaguauaaugca

SEQ ID NO: 1101 - RNA, 19 nt, Artificial Sequence
  Description of Artificial Sequence:  Synthetic
agaaagagccugucugccu

SEQ ID NO: 1102 - RNA, 19 nt, Artificial Sequence
  Description of Artificial Sequence:  Synthetic
uccugcugccaucaaccug

SEQ ID NO: 1103 - RNA, 19 nt, Artificial Sequence
  Description of Artificial Sequence:  Synthetic
gcugucuauagcucccaug

SEQ ID NO: 1104 - RNA, 19 nt, Artificial Sequence
  Description of Artificial Sequence:  Synthetic
ggcacccaggcuguucaug

SEQ ID NO: 1105 - RNA, 19 nt, Artificial Sequence
  Description of Artificial Sequence:  Synthetic
gccaaagggugccugcagg

SEQ ID NO: 1106 - RNA, 19 nt, Artificial Sequence
  Description of Artificial Sequence:  Synthetic
gcccacggcacagaaaggg

SEQ ID NO: 1107 - RNA, 19 nt, Artificial Sequence
  Description of Artificial Sequence:  Synthetic
gagucacaagacacuguug

SEQ ID NO: 1108 - RNA, 19 nt, Artificial Sequence
  Description of Artificial Sequence:  Synthetic
gcagagaaugaugauggcg

SEQ ID NO: 1109 - RNA, 19 nt, Artificial Sequence
  Description of Artificial Sequence:  Synthetic
ggguucagugaggaauggg

SEQ ID NO: 1110 - RNA, 19 nt, Artificial Sequence
  Description of Artificial Sequence:  Synthetic
gaagcccagagggacaguc

SEQ ID NO: 1111 - RNA, 19 nt, Artificial Sequence
  Description of Artificial Sequence:  Synthetic
caucuagggccucaucgcu

SEQ ID NO: 1112 - RNA, 19 nt, Artificial Sequence
  Description of Artificial Sequence:  Synthetic
ucuacaccugagucacgag

SEQ ID NO: 1113 - RNA, 19 nt, Artificial Sequence
  Description of Artificial Sequence:  Synthetic
gcugcuguccaggaacuuu

SEQ ID NO: 1114 - RNA, 19 nt, Artificial Sequence
  Description of Artificial Sequence:  Synthetic
uccagcaguauccucgcug

SEQ ID NO: 1115 - RNA, 19 nt, Artificial Sequence
  Description of Artificial Sequence:  Synthetic
ggugaagacccagaggaaa

SEQ ID NO: 1116 - RNA, 19 nt, Artificial Sequence
  Description of Artificial Sequence:  Synthetic
aggggaguaaaacuuggau

SEQ ID NO: 1117 - RNA, 19 nt, Artificial Sequence
  Description of Artificial Sequence:  Synthetic
uugggagauuucauuuucu

SEQ ID NO: 1118 - RNA, 19 nt, Artificial Sequence
  Description of Artificial Sequence:  Synthetic
uacaguguucugguuggua

SEQ ID NO: 1119 - RNA, 19 nt, Artificial Sequence
  Description of Artificial Sequence:  Synthetic
aaagccucagcaacagcca

SEQ ID NO: 1120 - RNA, 19 nt, Artificial Sequence
  Description of Artificial Sequence:  Synthetic
aguggagacuggaacacaa

SEQ ID NO: 1121 - RNA, 19 nt, Artificial Sequence
  Description of Artificial Sequence:  Synthetic
accauagccuguuucguag

SEQ ID NO: 1122 - RNA, 19 nt, Artificial Sequence
  Description of Artificial Sequence:  Synthetic
gccauauuaauugguuugu

SEQ ID NO: 1123 - RNA, 19 nt, Artificial Sequence
  Description of Artificial Sequence:  Synthetic
ugccuuacauuauuacucc

SEQ ID NO: 1124 - RNA, 19 nt, Artificial Sequence
  Description of Artificial Sequence:  Synthetic
cuugccauuuucaagaaag

SEQ ID NO: 1125 - RNA, 19 nt, Artificial Sequence
  Description of Artificial Sequence:  Synthetic
gcauugccagcucuuccaa

SEQ ID NO: 1126 - RNA, 19 nt, Artificial Sequence
  Description of Artificial Sequence:  Synthetic
aucuccaucaccuuugggc

SEQ ID NO: 1127 - RNA, 19 nt, Artificial Sequence
  Description of Artificial Sequence:  Synthetic
cuuguuuucuacuuugcca

SEQ ID NO: 1128 - RNA, 19 nt, Artificial Sequence
  Description of Artificial Sequence:  Synthetic
acagauuaucuuguacagc

SEQ ID NO: 1129 - RNA, 19 nt, Artificial Sequence
  Description of Artificial Sequence:  Synthetic
ccuuuuauggaccaauuag

SEQ ID NO: 1130 - RNA, 19 nt, Artificial Sequence
  Description of Artificial Sequence:  Synthetic
gcauuccaucaauuuuaua

SEQ ID NO: 1131 - RNA, 19 nt, Artificial Sequence
  Description of Artificial Sequence:  Synthetic
uuccaucaauuuuauaucu

SEQ ID NO: 1132 - RNA, 19 nt, Artificial Sequence
  Description of Artificial Sequence:  Synthetic
cggugcagguaacucuguc

SEQ ID NO: 1133 - RNA, 19 nt, Artificial Sequence
  Description of Artificial Sequence:  Synthetic
auucuggaaguaggacaac

SEQ ID NO: 1134 - RNA, 19 nt, Artificial Sequence
  Description of Artificial Sequence:  Synthetic
guccucagacaucugugca

SEQ ID NO: 1135 - RNA, 19 nt, Artificial Sequence
  Description of Artificial Sequence:  Synthetic
aguauugcucaggugguug

SEQ ID NO: 1136 - RNA, 19 nt, Artificial Sequence
  Description of Artificial Sequence:  Synthetic
ccguucucuauugucauua

SEQ ID NO: 1137 - RNA, 19 nt, Artificial Sequence
  Description of Artificial Sequence:  Synthetic
ucugucguugugcuccugc

SEQ ID NO: 1138 - RNA, 19 nt, Artificial Sequence
  Description of Artificial Sequence:  Synthetic
aggguggccaaggcuccgu

SEQ ID NO: 1139 - RNA, 19 nt, Artificial Sequence
  Description of Artificial Sequence:  Synthetic
uccauuagauaauggcuca

SEQ ID NO: 1140 - RNA, 19 nt, Artificial Sequence
  Description of Artificial Sequence:  Synthetic
ggaguuacccuggggucgu

SEQ ID NO: 1141 - RNA, 19 nt, Artificial Sequence
  Description of Artificial Sequence:  Synthetic
uugcuccaccaccugccgg

SEQ ID NO: 1142 - RNA, 19 nt, Artificial Sequence
  Description of Artificial Sequence:  Synthetic
cucaucuucuuccucaucu

SEQ ID NO: 1143 - RNA, 19 nt, Artificial Sequence
  Description of Artificial Sequence:  Synthetic
auauuucaaugucagcucc

SEQ ID NO: 1144 - RNA, 19 nt, Artificial Sequence
  Description of Artificial Sequence:  Synthetic
gaucacaugcuuggcgcca

SEQ ID NO: 1145 - RNA, 19 nt, Artificial Sequence
  Description of Artificial Sequence:  Synthetic
cacagggacaaagagcaug

SEQ ID NO: 1146 - RNA, 19 nt, Artificial Sequence
  Description of Artificial Sequence:  Synthetic
caccaccaugcagagaguc

SEQ ID NO: 1147 - RNA, 19 nt, Artificial Sequence
  Description of Artificial Sequence:  Synthetic
cuuaaugguagccacgacc

SEQ ID NO: 1148 - RNA, 19 nt, Artificial Sequence
  Description of Artificial Sequence:  Synthetic
gguauaaaagcugacugac

SEQ ID NO: 1149 - RNA, 19 nt, Artificial Sequence
  Description of Artificial Sequence:  Synthetic
uagcugcccauccuuccgg

SEQ ID NO: 1150 - RNA, 19 nt, Artificial Sequence
  Description of Artificial Sequence:  Synthetic
ugugaaugggguauagauu

SEQ ID NO: 1151 - RNA, 19 nt, Artificial Sequence
  Description of Artificial Sequence:  Synthetic
cacagucucgguaucuucu

SEQ ID NO: 1152 - RNA, 19 nt, Artificial Sequence
  Description of Artificial Sequence:  Synthetic
gugcagggcucucuggccc

SEQ ID NO: 1153 - RNA, 19 nt, Artificial Sequence
  Description of Artificial Sequence:  Synthetic
ggcagcauucagaauugag

SEQ ID NO: 1154 - RNA, 19 nt, Artificial Sequence
  Description of Artificial Sequence:  Synthetic
aaugacacugaucaugaug

SEQ ID NO: 1155 - RNA, 19 nt, Artificial Sequence
  Description of Artificial Sequence:  Synthetic
gaggauagucaugacaaca

SEQ ID NO: 1156 - RNA, 19 nt, Artificial Sequence
  Description of Artificial Sequence:  Synthetic
uuuauacagaaccaccagg

SEQ ID NO: 1157 - RNA, 19 nt, Artificial Sequence
  Description of Artificial Sequence:  Synthetic
gaccuuauagcaccuguau

SEQ ID NO: 1158 - RNA, 19 nt, Artificial Sequence
  Description of Artificial Sequence:  Synthetic
aauaagccaggcauggaug

SEQ ID NO: 1159 - RNA, 19 nt, Artificial Sequence
  Description of Artificial Sequence:  Synthetic
caacaauagagaugauaua

SEQ ID NO: 1160 - RNA, 19 nt, Artificial Sequence
  Description of Artificial Sequence:  Synthetic
gaaugaaaaaaagaacagc

SEQ ID NO: 1161 - RNA, 19 nt, Artificial Sequence
  Description of Artificial Sequence:  Synthetic
cacuucccccaaguaaaug

SEQ ID NO: 1162 - RNA, 19 nt, Artificial Sequence
  Description of Artificial Sequence:  Synthetic
aacguuauagguuuuaaac

SEQ ID NO: 1163 - RNA, 19 nt, Artificial Sequence
  Description of Artificial Sequence:  Synthetic
aguaauguaguccacagca

SEQ ID NO: 1164 - RNA, 19 nt, Artificial Sequence
  Description of Artificial Sequence:  Synthetic
ccagaucaggagugcaaca

SEQ ID NO: 1165 - RNA, 19 nt, Artificial Sequence
  Description of Artificial Sequence:  Synthetic
ucccaccacaccaaaauuc

SEQ ID NO: 1166 - RNA, 19 nt, Artificial Sequence
  Description of Artificial Sequence:  Synthetic
ccagugaauggaaaucauu

SEQ ID NO: 1167 - RNA, 19 nt, Artificial Sequence
  Description of Artificial Sequence:  Synthetic
gagucgaaguggaccuuuc

SEQ ID NO: 1168 - RNA, 19 nt, Artificial Sequence
  Description of Artificial Sequence:  Synthetic
aaugagauaugccugcugg

SEQ ID NO: 1169 - RNA, 19 nt, Artificial Sequence
  Description of Artificial Sequence:  Synthetic
caugagggcacuaaucaua

SEQ ID NO: 1170 - RNA, 19 nt, Artificial Sequence
  Description of Artificial Sequence:  Synthetic
cuugauaaacaccagggcc

SEQ ID NO: 1171 - RNA, 19 nt, Artificial Sequence
  Description of Artificial Sequence:  Synthetic
aguccauucagggagguac

SEQ ID NO: 1172 - RNA, 19 nt, Artificial Sequence
  Description of Artificial Sequence:  Synthetic
agccaagaugagccacgca

SEQ ID NO: 1173 - RNA, 19 nt, Artificial Sequence
  Description of Artificial Sequence:  Synthetic
aucauauaccgaaaucaca

SEQ ID NO: 1174 - RNA, 19 nt, Artificial Sequence
  Description of Artificial Sequence:  Synthetic
acacaaaacagccacuaaa

SEQ ID NO: 1175 - RNA, 19 nt, Artificial Sequence
  Description of Artificial Sequence:  Synthetic
acgaaguggaccuuucgga

SEQ ID NO: 1176 - RNA, 19 nt, Artificial Sequence
  Description of Artificial Sequence:  Synthetic
agcuguuucaaccagcaua

SEQ ID NO: 1177 - RNA, 19 nt, Artificial Sequence
  Description of Artificial Sequence:  Synthetic
cguuucauuucucuccuga

SEQ ID NO: 1178 - RNA, 19 nt, Artificial Sequence
  Description of Artificial Sequence:  Synthetic
aaugagagcuggaaaaagc

SEQ ID NO: 1179 - RNA, 19 nt, Artificial Sequence
  Description of Artificial Sequence:  Synthetic
caccauuguugaggaguaa

SEQ ID NO: 1180 - RNA, 19 nt, Artificial Sequence
  Description of Artificial Sequence:  Synthetic
ugccauauucaccaaccac

SEQ ID NO: 1181 - RNA, 19 nt, Artificial Sequence
  Description of Artificial Sequence:  Synthetic
agcuuccgggucuccuucu

SEQ ID NO: 1182 - RNA, 19 nt, Artificial Sequence
  Description of Artificial Sequence:  Synthetic
uuuggauacucuccuuuga

SEQ ID NO: 1183 - RNA, 19 nt, Artificial Sequence
  Description of Artificial Sequence:  Synthetic
ugcauuauacuuggaauuu

SEQ ID NO: 1184 - RNA, 19 nt, Artificial Sequence
  Description of Artificial Sequence:  Synthetic
aggcagacaggcucuuucu

SEQ ID NO: 1185 - RNA, 19 nt, Artificial Sequence
  Description of Artificial Sequence:  Synthetic
cagguugauggcagcagga

SEQ ID NO: 1186 - RNA, 19 nt, Artificial Sequence
  Description of Artificial Sequence:  Synthetic
caugggagcuauagacagc

SEQ ID NO: 1187 - RNA, 19 nt, Artificial Sequence
  Description of Artificial Sequence:  Synthetic
caugaacagccugggugcc

SEQ ID NO: 1188 - RNA, 19 nt, Artificial Sequence
  Description of Artificial Sequence:  Synthetic
ccugcaggcacccuuuggc

SEQ ID NO: 1189 - RNA, 19 nt, Artificial Sequence
  Description of Artificial Sequence:  Synthetic
cccuuucugugccgugggc

SEQ ID NO: 1190 - RNA, 19 nt, Artificial Sequence
  Description of Artificial Sequence:  Synthetic
caacagugucuugugacuc

SEQ ID NO: 1191 - RNA, 19 nt, Artificial Sequence
  Description of Artificial Sequence:  Synthetic
cgccaucaucauucucugc

SEQ ID NO: 1192 - RNA, 19 nt, Artificial Sequence
  Description of Artificial Sequence:  Synthetic
cccauuccucacugaaccc

SEQ ID NO: 1193 - RNA, 19 nt, Artificial Sequence
  Description of Artificial Sequence:  Synthetic
gacugucccucugggcuuc

SEQ ID NO: 1194 - RNA, 19 nt, Artificial Sequence
  Description of Artificial Sequence:  Synthetic
agcgaugaggcccuagaug

SEQ ID NO: 1195 - RNA, 19 nt, Artificial Sequence
  Description of Artificial Sequence:  Synthetic
cucgugacucagguguaga

SEQ ID NO: 1196 - RNA, 19 nt, Artificial Sequence
  Description of Artificial Sequence:  Synthetic
aaaguuccuggacagcagc

SEQ ID NO: 1197 - RNA, 19 nt, Artificial Sequence
  Description of Artificial Sequence:  Synthetic
cagcgaggauacugcugga

SEQ ID NO: 1198 - RNA, 19 nt, Artificial Sequence
  Description of Artificial Sequence:  Synthetic
uuuccucugggucuucacc

SEQ ID NO: 1199 - RNA, 19 nt, Artificial Sequence
  Description of Artificial Sequence:  Synthetic
auccaaguuuuacuccccu

SEQ ID NO: 1200 - RNA, 19 nt, Artificial Sequence
  Description of Artificial Sequence:  Synthetic
agaaaaugaaaucucccaa

SEQ ID NO: 1201 - RNA, 19 nt, Artificial Sequence
  Description of Artificial Sequence:  Synthetic
uaccaaccagaacacugua

SEQ ID NO: 1202 - RNA, 19 nt, Artificial Sequence
  Description of Artificial Sequence:  Synthetic
uggcuguugcugaggcuuu

SEQ ID NO: 1203 - RNA, 19 nt, Artificial Sequence
  Description of Artificial Sequence:  Synthetic
uuguguuccagucuccacu

SEQ ID NO: 1204 - RNA, 19 nt, Artificial Sequence
  Description of Artificial Sequence:  Synthetic
cuacgaaacaggcuauggu

SEQ ID NO: 1205 - RNA, 19 nt, Artificial Sequence
  Description of Artificial Sequence:  Synthetic
acaaaccaauuaauauggc

SEQ ID NO: 1206 - RNA, 19 nt, Artificial Sequence
  Description of Artificial Sequence:  Synthetic
ggaguaauaauguaaggca

SEQ ID NO: 1207 - RNA, 19 nt, Artificial Sequence
  Description of Artificial Sequence:  Synthetic
cuuucuugaaaauggcaag

SEQ ID NO: 1208 - RNA, 19 nt, Artificial Sequence
  Description of Artificial Sequence:  Synthetic
uuggaagagcuggcaaugc

SEQ ID NO: 1209 - RNA, 19 nt, Artificial Sequence
  Description of Artificial Sequence:  Synthetic
gcccaaaggugauggagau

SEQ ID NO: 1210 - RNA, 19 nt, Artificial Sequence
  Description of Artificial Sequence:  Synthetic
uggcaaaguagaaaacaag

SEQ ID NO: 1211 - RNA, 19 nt, Artificial Sequence
  Description of Artificial Sequence:  Synthetic
gcuguacaagauaaucugu

SEQ ID NO: 1212 - RNA, 19 nt, Artificial Sequence
  Description of Artificial Sequence:  Synthetic
cuaauugguccauaaaagg

SEQ ID NO: 1213 - RNA, 19 nt, Artificial Sequence
  Description of Artificial Sequence:  Synthetic
uauaaaauugauggaaugc

SEQ ID NO: 1214 - RNA, 19 nt, Artificial Sequence
  Description of Artificial Sequence:  Synthetic
agauauaaaauugauggaa

SEQ ID NO: 1215 - RNA, 19 nt, Artificial Sequence
  Description of Artificial Sequence:  Synthetic
agcggcggcggagcaggca

SEQ ID NO: 1216 - RNA, 19 nt, Artificial Sequence
  Description of Artificial Sequence:  Synthetic
auuuccagcagugaggaga

SEQ ID NO: 1217 - RNA, 19 nt, Artificial Sequence
  Description of Artificial Sequence:  Synthetic
acagccagaagcaagcuau

SEQ ID NO: 1218 - RNA, 19 nt, Artificial Sequence
  Description of Artificial Sequence:  Synthetic
uuggagcugaaggaaccug

SEQ ID NO: 1219 - RNA, 19 nt, Artificial Sequence
  Description of Artificial Sequence:  Synthetic
gagacagaagcuagucccc

SEQ ID NO: 1220 - RNA, 19 nt, Artificial Sequence
  Description of Artificial Sequence:  Synthetic
cccucugaauuuuacugau

SEQ ID NO: 1221 - RNA, 19 nt, Artificial Sequence
  Description of Artificial Sequence:  Synthetic
ugaagaaacugaggccaca

SEQ ID NO: 1222 - RNA, 19 nt, Artificial Sequence
  Description of Artificial Sequence:  Synthetic
agagcuaaagugacuuuuc

SEQ ID NO: 1223 - RNA, 19 nt, Artificial Sequence
  Description of Artificial Sequence:  Synthetic
cccaaggucgcccagcgag

SEQ ID NO: 1224 - RNA, 19 nt, Artificial Sequence
  Description of Artificial Sequence:  Synthetic
ggacgugggacuucucaga

SEQ ID NO: 1225 - RNA, 19 nt, Artificial Sequence
  Description of Artificial Sequence:  Synthetic
acgucaggagagugaugug

SEQ ID NO: 1226 - RNA, 19 nt, Artificial Sequence
  Description of Artificial Sequence:  Synthetic
gagggagcugugugaccau

SEQ ID NO: 1227 - RNA, 19 nt, Artificial Sequence
  Description of Artificial Sequence:  Synthetic
uagaaagugacguguuaaa

SEQ ID NO: 1228 - RNA, 19 nt, Artificial Sequence
  Description of Artificial Sequence:  Synthetic
aaaccagcgcugcccucuu

SEQ ID NO: 1229 - RNA, 19 nt, Artificial Sequence
  Description of Artificial Sequence:  Synthetic
uugaaagccagggagcauc

SEQ ID NO: 1230 - RNA, 19 nt, Artificial Sequence
  Description of Artificial Sequence:  Synthetic
cauucauuuagccugcuga

SEQ ID NO: 1231 - RNA, 19 nt, Artificial Sequence
  Description of Artificial Sequence:  Synthetic
agaagaagaaaccaagugu

SEQ ID NO: 1232 - RNA, 19 nt, Artificial Sequence
  Description of Artificial Sequence:  Synthetic
uccgggauucagaccucuc

SEQ ID NO: 1233 - RNA, 19 nt, Artificial Sequence
  Description of Artificial Sequence:  Synthetic
cugcggccccaaguguucg

SEQ ID NO: 1234 - RNA, 19 nt, Artificial Sequence
  Description of Artificial Sequence:  Synthetic
guggugcuuccagaggcag

SEQ ID NO: 1235 - RNA, 19 nt, Artificial Sequence
  Description of Artificial Sequence:  Synthetic
gggcuaugcucacauucau

SEQ ID NO: 1236 - RNA, 19 nt, Artificial Sequence
  Description of Artificial Sequence:  Synthetic
uggccucugacagcgagga

SEQ ID NO: 1237 - RNA, 19 nt, Artificial Sequence
  Description of Artificial Sequence:  Synthetic
aagaagugugugaugagcg

SEQ ID NO: 1238 - RNA, 19 nt, Artificial Sequence
  Description of Artificial Sequence:  Synthetic
ggacgucccuaaugucggc

SEQ ID NO: 1239 - RNA, 19 nt, Artificial Sequence
  Description of Artificial Sequence:  Synthetic
ccgagagccccacgccgcg

SEQ ID NO: 1240 - RNA, 19 nt, Artificial Sequence
  Description of Artificial Sequence:  Synthetic
gcuccugccaggagggcag

SEQ ID NO: 1241 - RNA, 19 nt, Artificial Sequence
  Description of Artificial Sequence:  Synthetic
ggcagggcccagaggaugg

SEQ ID NO: 1242 - RNA, 19 nt, Artificial Sequence
  Description of Artificial Sequence:  Synthetic
gagagaacacugcccagug

SEQ ID NO: 1243 - RNA, 19 nt, Artificial Sequence
  Description of Artificial Sequence:  Synthetic
ggagaagccaggagaacga

SEQ ID NO: 1244 - RNA, 19 nt, Artificial Sequence
  Description of Artificial Sequence:  Synthetic
aggaggacggugaggagga

SEQ ID NO: 1245 - RNA, 19 nt, Artificial Sequence
  Description of Artificial Sequence:  Synthetic
acccugaccgcuaugucug

SEQ ID NO: 1246 - RNA, 19 nt, Artificial Sequence
  Description of Artificial Sequence:  Synthetic
guagugggguucccgggcg

SEQ ID NO: 1247 - RNA, 19 nt, Artificial Sequence
  Description of Artificial Sequence:  Synthetic
ggccgccaggccuggagga

SEQ ID NO: 1248 - RNA, 19 nt, Artificial Sequence
  Description of Artificial Sequence:  Synthetic
aagagcugacccucaaaua

SEQ ID NO: 1249 - RNA, 19 nt, Artificial Sequence
  Description of Artificial Sequence:  Synthetic
acggagcgaagcacgugau

SEQ ID NO: 1250 - RNA, 19 nt, Artificial Sequence
  Description of Artificial Sequence:  Synthetic
ucaugcuguuugugccugu

SEQ ID NO: 1251 - RNA, 19 nt, Artificial Sequence
  Description of Artificial Sequence:  Synthetic
ucacucugugcaugaucgu

SEQ ID NO: 1252 - RNA, 19 nt, Artificial Sequence
  Description of Artificial Sequence:  Synthetic
uggugguagccaccaucaa

SEQ ID NO: 1253 - RNA, 19 nt, Artificial Sequence
  Description of Artificial Sequence:  Synthetic
agucugugcgcuucuacac

SEQ ID NO: 1254 - RNA, 19 nt, Artificial Sequence
  Description of Artificial Sequence:  Synthetic
cagagaagaauggacagcu

SEQ ID NO: 1255 - RNA, 19 nt, Artificial Sequence
  Description of Artificial Sequence:  Synthetic
ucaucuacacgacauucac

SEQ ID NO: 1256 - RNA, 19 nt, Artificial Sequence
  Description of Artificial Sequence:  Synthetic
cugaggacacacccucggu

SEQ ID NO: 1257 - RNA, 19 nt, Artificial Sequence
  Description of Artificial Sequence:  Synthetic
ugggccagcgccuccucaa

SEQ ID NO: 1258 - RNA, 19 nt, Artificial Sequence
  Description of Artificial Sequence:  Synthetic
acuccgugcugaacacccu

SEQ ID NO: 1259 - RNA, 19 nt, Artificial Sequence
  Description of Artificial Sequence:  Synthetic
ucaucaugaucagcgucau

SEQ ID NO: 1260 - RNA, 19 nt, Artificial Sequence
  Description of Artificial Sequence:  Synthetic
ucgugguuaugaccaucuu

SEQ ID NO: 1261 - RNA, 19 nt, Artificial Sequence
  Description of Artificial Sequence:  Synthetic
ucuugguggugcucuacaa

SEQ ID NO: 1262 - RNA, 19 nt, Artificial Sequence
  Description of Artificial Sequence:  Synthetic
aguaccgcugcuacaaguu

SEQ ID NO: 1263 - RNA, 19 nt, Artificial Sequence
  Description of Artificial Sequence:  Synthetic
ucauccauggcugguugau

SEQ ID NO: 1264 - RNA, 19 nt, Artificial Sequence
  Description of Artificial Sequence:  Synthetic
ucaugucuucacugaugcu

SEQ ID NO: 1265 - RNA, 19 nt, Artificial Sequence
  Description of Artificial Sequence:  Synthetic
ugcuguuccucuucaccua

SEQ ID NO: 1266 - RNA, 19 nt, Artificial Sequence
  Description of Artificial Sequence:  Synthetic
auaucuaccuuggggaagu

SEQ ID NO: 1267 - RNA, 19 nt, Artificial Sequence
  Description of Artificial Sequence:  Synthetic
ugcucaagaccuacaaugu

SEQ ID NO: 1268 - RNA, 19 nt, Artificial Sequence
  Description of Artificial Sequence:  Synthetic
uggccauggacuaccccac

SEQ ID NO: 1269 - RNA, 19 nt, Artificial Sequence
  Description of Artificial Sequence:  Synthetic
cccucuugcugacugucug

SEQ ID NO: 1270 - RNA, 19 nt, Artificial Sequence
  Description of Artificial Sequence:  Synthetic
ggaacuucggggcaguggg

SEQ ID NO: 1271 - RNA, 19 nt, Artificial Sequence
  Description of Artificial Sequence:  Synthetic
gcauggugugcauccacug

SEQ ID NO: 1272 - RNA, 19 nt, Artificial Sequence
  Description of Artificial Sequence:  Synthetic
ggaagggcccucuggugcu

SEQ ID NO: 1273 - RNA, 19 nt, Artificial Sequence
  Description of Artificial Sequence:  Synthetic
ugcagcaggccuaccucau

SEQ ID NO: 1274 - RNA, 19 nt, Artificial Sequence
  Description of Artificial Sequence:  Synthetic
ucaugaucagugcgcucau

SEQ ID NO: 1275 - RNA, 19 nt, Artificial Sequence
  Description of Artificial Sequence:  Synthetic
uggcccuaguguucaucaa

SEQ ID NO: 1276 - RNA, 19 nt, Artificial Sequence
  Description of Artificial Sequence:  Synthetic
aguaccucccagagugguc

SEQ ID NO: 1277 - RNA, 19 nt, Artificial Sequence
  Description of Artificial Sequence:  Synthetic
ccgcgugggucauccuggg

SEQ ID NO: 1278 - RNA, 19 nt, Artificial Sequence
  Description of Artificial Sequence:  Synthetic
gcgccaucucuguguauga

SEQ ID NO: 1279 - RNA, 19 nt, Artificial Sequence
  Description of Artificial Sequence:  Synthetic
aucucguggcugugcugug

SEQ ID NO: 1280 - RNA, 19 nt, Artificial Sequence
  Description of Artificial Sequence:  Synthetic
gucccaaagggccucugag

SEQ ID NO: 1281 - RNA, 19 nt, Artificial Sequence
  Description of Artificial Sequence:  Synthetic
gaaugcugguagaaacugc

SEQ ID NO: 1282 - RNA, 19 nt, Artificial Sequence
  Description of Artificial Sequence:  Synthetic
cccaggagagaaaugagcc

SEQ ID NO: 1283 - RNA, 19 nt, Artificial Sequence
  Description of Artificial Sequence:  Synthetic
ccauauucccugcccugau

SEQ ID NO: 1284 - RNA, 19 nt, Artificial Sequence
  Description of Artificial Sequence:  Synthetic
uauacucaucugccauggu

SEQ ID NO: 1285 - RNA, 19 nt, Artificial Sequence
  Description of Artificial Sequence:  Synthetic
uguggacgguuggcauggc

SEQ ID NO: 1286 - RNA, 19 nt, Artificial Sequence
  Description of Artificial Sequence:  Synthetic
cgaagcuggaccccuccuc

SEQ ID NO: 1287 - RNA, 19 nt, Artificial Sequence
  Description of Artificial Sequence:  Synthetic
cucagggugcccuccagcu

SEQ ID NO: 1288 - RNA, 19 nt, Artificial Sequence
  Description of Artificial Sequence:  Synthetic
uccccuacgacccggagau

SEQ ID NO: 1289 - RNA, 19 nt, Artificial Sequence
  Description of Artificial Sequence:  Synthetic
uggaagaagacuccuauga

SEQ ID NO: 1290 - RNA, 19 nt, Artificial Sequence
  Description of Artificial Sequence:  Synthetic
acaguuuuggggagccuuc

SEQ ID NO: 1291 - RNA, 19 nt, Artificial Sequence
  Description of Artificial Sequence:  Synthetic
cauaccccgaagucuuuga

SEQ ID NO: 1292 - RNA, 19 nt, Artificial Sequence
  Description of Artificial Sequence:  Synthetic
agccucccuugacuggcua

SEQ ID NO: 1293 - RNA, 19 nt, Artificial Sequence
  Description of Artificial Sequence:  Synthetic
acccaggggaggagcugga

SEQ ID NO: 1294 - RNA, 19 nt, Artificial Sequence
  Description of Artificial Sequence:  Synthetic
aggaagaggaggaaagggg

SEQ ID NO: 1295 - RNA, 19 nt, Artificial Sequence
  Description of Artificial Sequence:  Synthetic
gcgugaagcuuggccucgg

SEQ ID NO: 1296 - RNA, 19 nt, Artificial Sequence
  Description of Artificial Sequence:  Synthetic
gggacuucaucuucuacag

SEQ ID NO: 1297 - RNA, 19 nt, Artificial Sequence
  Description of Artificial Sequence:  Synthetic
gugugcuggugggcaaggc

SEQ ID NO: 1298 - RNA, 19 nt, Artificial Sequence
  Description of Artificial Sequence:  Synthetic
cggcugccacgggcagcgg

SEQ ID NO: 1299 - RNA, 19 nt, Artificial Sequence
  Description of Artificial Sequence:  Synthetic
gggacuggaauaccacgcu

SEQ ID NO: 1300 - RNA, 19 nt, Artificial Sequence
  Description of Artificial Sequence:  Synthetic
uggccugcuucguggccau

SEQ ID NO: 1301 - RNA, 19 nt, Artificial Sequence
  Description of Artificial Sequence:  Synthetic
uccucauuggcuugugucu

SEQ ID NO: 1302 - RNA, 19 nt, Artificial Sequence
  Description of Artificial Sequence:  Synthetic
ugacccuccugcugcuugc

SEQ ID NO: 1303 - RNA, 19 nt, Artificial Sequence
  Description of Artificial Sequence:  Synthetic
cuguguucaagaaggcgcu

SEQ ID NO: 1304 - RNA, 19 nt, Artificial Sequence
  Description of Artificial Sequence:  Synthetic
ugcccgcccuccccaucuc

SEQ ID NO: 1305 - RNA, 19 nt, Artificial Sequence
  Description of Artificial Sequence:  Synthetic
ccaucacguucgggcucau

SEQ ID NO: 1306 - RNA, 19 nt, Artificial Sequence
  Description of Artificial Sequence:  Synthetic
ucuuuuacuucuccacgga

SEQ ID NO: 1307 - RNA, 19 nt, Artificial Sequence
  Description of Artificial Sequence:  Synthetic
acaaccuggugcggccguu

SEQ ID NO: 1308 - RNA, 19 nt, Artificial Sequence
  Description of Artificial Sequence:  Synthetic
ucauggacacccuggccuc

SEQ ID NO: 1309 - RNA, 19 nt, Artificial Sequence
  Description of Artificial Sequence:  Synthetic
cccaucagcucuacaucug

SEQ ID NO: 1310 - RNA, 19 nt, Artificial Sequence
  Description of Artificial Sequence:  Synthetic
gagggacauggugugccac

SEQ ID NO: 1311 - RNA, 19 nt, Artificial Sequence
  Description of Artificial Sequence:  Synthetic
caggcugcaagcugcaggg

SEQ ID NO: 1312 - RNA, 19 nt, Artificial Sequence
  Description of Artificial Sequence:  Synthetic
gaauuuucauuggaugcag

SEQ ID NO: 1313 - RNA, 19 nt, Artificial Sequence
  Description of Artificial Sequence:  Synthetic
guuguauaguuuuacacuc

SEQ ID NO: 1314 - RNA, 19 nt, Artificial Sequence
  Description of Artificial Sequence:  Synthetic
cuagugccauauauuuuua

SEQ ID NO: 1315 - RNA, 19 nt, Artificial Sequence
  Description of Artificial Sequence:  Synthetic
aagacuuuucuuuccuuaa

SEQ ID NO: 1316 - RNA, 19 nt, Artificial Sequence
  Description of Artificial Sequence:  Synthetic
aaaaauaaaguacguguuu

SEQ ID NO: 1317 - RNA, 19 nt, Artificial Sequence
  Description of Artificial Sequence:  Synthetic
uacuuggugaggaggaggc

SEQ ID NO: 1318 - RNA, 19 nt, Artificial Sequence
  Description of Artificial Sequence:  Synthetic
cagaaccagcucuuuggug

SEQ ID NO: 1319 - RNA, 19 nt, Artificial Sequence
  Description of Artificial Sequence:  Synthetic
gccagcuguuucaucacca

SEQ ID NO: 1320 - RNA, 19 nt, Artificial Sequence
  Description of Artificial Sequence:  Synthetic
agacuuuggcucccgcuuu

SEQ ID NO: 1321 - RNA, 19 nt, Artificial Sequence
  Description of Artificial Sequence:  Synthetic
uggggagcgccucgcuuca

SEQ ID NO: 1322 - RNA, 19 nt, Artificial Sequence
  Description of Artificial Sequence:  Synthetic
acggacaggaagcacagca

SEQ ID NO: 1323 - RNA, 19 nt, Artificial Sequence
  Description of Artificial Sequence:  Synthetic
agguuuauccagaugaacu

SEQ ID NO: 1324 - RNA, 19 nt, Artificial Sequence
  Description of Artificial Sequence:  Synthetic
ugagaaggucagauuaggg

SEQ ID NO: 1325 - RNA, 19 nt, Artificial Sequence
  Description of Artificial Sequence:  Synthetic
gcggggagaagagcauccg

SEQ ID NO: 1326 - RNA, 19 nt, Artificial Sequence
  Description of Artificial Sequence:  Synthetic
ggcaugagggcugagaugc

SEQ ID NO: 1327 - RNA, 19 nt, Artificial Sequence
  Description of Artificial Sequence:  Synthetic
cgcaaagagugugcucggg

SEQ ID NO: 1328 - RNA, 19 nt, Artificial Sequence
  Description of Artificial Sequence:  Synthetic
gaguggccccuggcaccug

SEQ ID NO: 1329 - RNA, 19 nt, Artificial Sequence
  Description of Artificial Sequence:  Synthetic
gggugcucuggcuggagag

SEQ ID NO: 1330 - RNA, 19 nt, Artificial Sequence
  Description of Artificial Sequence:  Synthetic
ggaaaagccaguucccuac

SEQ ID NO: 1331 - RNA, 19 nt, Artificial Sequence
  Description of Artificial Sequence:  Synthetic
cgaggaguguucccaaugc

SEQ ID NO: 1332 - RNA, 19 nt, Artificial Sequence
  Description of Artificial Sequence:  Synthetic
cuuuguccaugauguccuu

SEQ ID NO: 1333 - RNA, 19 nt, Artificial Sequence
  Description of Artificial Sequence:  Synthetic
uguuauuuuauugccuuua

SEQ ID NO: 1334 - RNA, 19 nt, Artificial Sequence
  Description of Artificial Sequence:  Synthetic
agaaacugaguccuguucu

SEQ ID NO: 1335 - RNA, 19 nt, Artificial Sequence
  Description of Artificial Sequence:  Synthetic
uuguuacggcagucacacu

SEQ ID NO: 1336 - RNA, 19 nt, Artificial Sequence
  Description of Artificial Sequence:  Synthetic
ugcugggaaguggcuuaau

SEQ ID NO: 1337 - RNA, 19 nt, Artificial Sequence
  Description of Artificial Sequence:  Synthetic
uaguaauaucaauaaauag

SEQ ID NO: 1338 - RNA, 19 nt, Artificial Sequence
  Description of Artificial Sequence:  Synthetic
agaugaguccuguuagaaa

SEQ ID NO: 1339 - RNA, 19 nt, Artificial Sequence
  Description of Artificial Sequence:  Synthetic
ugccugcuccgccgccgcu

SEQ ID NO: 1340 - RNA, 19 nt, Artificial Sequence
  Description of Artificial Sequence:  Synthetic
ucuccucacugcuggaaau

SEQ ID NO: 1341 - RNA, 19 nt, Artificial Sequence
  Description of Artificial Sequence:  Synthetic
auagcuugcuucuggcugu

SEQ ID NO: 1342 - RNA, 19 nt, Artificial Sequence
  Description of Artificial Sequence:  Synthetic
cagguuccuucagcuccaa

SEQ ID NO: 1343 - RNA, 19 nt, Artificial Sequence
  Description of Artificial Sequence:  Synthetic
ggggacuagcuucugucuc

SEQ ID NO: 1344 - RNA, 19 nt, Artificial Sequence
  Description of Artificial Sequence:  Synthetic
aucaguaaaauucagaggg

SEQ ID NO: 1345 - RNA, 19 nt, Artificial Sequence
  Description of Artificial Sequence:  Synthetic
uguggccucaguuucuuca

SEQ ID NO: 1346 - RNA, 19 nt, Artificial Sequence
  Description of Artificial Sequence:  Synthetic
gaaaagucacuuuagcucu

SEQ ID NO: 1347 - RNA, 19 nt, Artificial Sequence
  Description of Artificial Sequence:  Synthetic
cucgcugggcgaccuuggg

SEQ ID NO: 1348 - RNA, 19 nt, Artificial Sequence
  Description of Artificial Sequence:  Synthetic
ucugagaagucccacgucc

SEQ ID NO: 1349 - RNA, 19 nt, Artificial Sequence
  Description of Artificial Sequence:  Synthetic
cacaucacucuccugacgu

SEQ ID NO: 1350 - RNA, 19 nt, Artificial Sequence
  Description of Artificial Sequence:  Synthetic
auggucacacagcucccuc

SEQ ID NO: 1351 - RNA, 19 nt, Artificial Sequence
  Description of Artificial Sequence:  Synthetic
uuuaacacgucacuuucua

SEQ ID NO: 1352 - RNA, 19 nt, Artificial Sequence
  Description of Artificial Sequence:  Synthetic
aagagggcagcgcugguuu

SEQ ID NO: 1353 - RNA, 19 nt, Artificial Sequence
  Description of Artificial Sequence:  Synthetic
gaugcucccuggcuuucaa

SEQ ID NO: 1354 - RNA, 19 nt, Artificial Sequence
  Description of Artificial Sequence:  Synthetic
ucagcaggcuaaaugaaug

SEQ ID NO: 1355 - RNA, 19 nt, Artificial Sequence
  Description of Artificial Sequence:  Synthetic
acacuugguuucuucuucu

SEQ ID NO: 1356 - RNA, 19 nt, Artificial Sequence
  Description of Artificial Sequence:  Synthetic
gagaggucugaaucccgga

SEQ ID NO: 1357 - RNA, 19 nt, Artificial Sequence
  Description of Artificial Sequence:  Synthetic
cgaacacuuggggccgcag

SEQ ID NO: 1358 - RNA, 19 nt, Artificial Sequence
  Description of Artificial Sequence:  Synthetic
cugccucuggaagcaccac

SEQ ID NO: 1359 - RNA, 19 nt, Artificial Sequence
  Description of Artificial Sequence:  Synthetic
augaaugugagcauagccc

SEQ ID NO: 1360 - RNA, 19 nt, Artificial Sequence
  Description of Artificial Sequence:  Synthetic
uccucgcugucagaggcca

SEQ ID NO: 1361 - RNA, 19 nt, Artificial Sequence
  Description of Artificial Sequence:  Synthetic
cgcucaucacacacuucuu

SEQ ID NO: 1362 - RNA, 19 nt, Artificial Sequence
  Description of Artificial Sequence:  Synthetic
gccgacauuagggacgucc

SEQ ID NO: 1363 - RNA, 19 nt, Artificial Sequence
  Description of Artificial Sequence:  Synthetic
cgcggcguggggcucucgg

SEQ ID NO: 1364 - RNA, 19 nt, Artificial Sequence
  Description of Artificial Sequence:  Synthetic
cugcccuccuggcaggagc

SEQ ID NO: 1365 - RNA, 19 nt, Artificial Sequence
  Description of Artificial Sequence:  Synthetic
ccauccucugggcccugcc

SEQ ID NO: 1366 - RNA, 19 nt, Artificial Sequence
  Description of Artificial Sequence:  Synthetic
cacugggcaguguucucuc

SEQ ID NO: 1367 - RNA, 19 nt, Artificial Sequence
  Description of Artificial Sequence:  Synthetic
ucguucuccuggcuucucc

SEQ ID NO: 1368 - RNA, 19 nt, Artificial Sequence
  Description of Artificial Sequence:  Synthetic
uccuccucaccguccuccu

SEQ ID NO: 1369 - RNA, 19 nt, Artificial Sequence
  Description of Artificial Sequence:  Synthetic
cagacauagcggucagggu

SEQ ID NO: 1370 - RNA, 19 nt, Artificial Sequence
  Description of Artificial Sequence:  Synthetic
cgcccgggaaccccacuac

SEQ ID NO: 1371 - RNA, 19 nt, Artificial Sequence
  Description of Artificial Sequence:  Synthetic
uccuccaggccuggcggcc

SEQ ID NO: 1372 - RNA, 19 nt, Artificial Sequence
  Description of Artificial Sequence:  Synthetic
uauuugagggucagcucuu

SEQ ID NO: 1373 - RNA, 19 nt, Artificial Sequence
  Description of Artificial Sequence:  Synthetic
aucacgugcuucgcuccgu

SEQ ID NO: 1374 - RNA, 19 nt, Artificial Sequence
  Description of Artificial Sequence:  Synthetic
acaggcacaaacagcauga

SEQ ID NO: 1375 - RNA, 19 nt, Artificial Sequence
  Description of Artificial Sequence:  Synthetic
acgaucaugcacagaguga

SEQ ID NO: 1376 - RNA, 19 nt, Artificial Sequence
  Description of Artificial Sequence:  Synthetic
uugaugguggcuaccacca

SEQ ID NO: 1377 - RNA, 19 nt, Artificial Sequence
  Description of Artificial Sequence:  Synthetic
guguagaagcgcacagacu

SEQ ID NO: 1378 - RNA, 19 nt, Artificial Sequence
  Description of Artificial Sequence:  Synthetic
agcuguccauucuucucug

SEQ ID NO: 1379 - RNA, 19 nt, Artificial Sequence
  Description of Artificial Sequence:  Synthetic
gugaaugucguguagauga

SEQ ID NO: 1380 - RNA, 19 nt, Artificial Sequence
  Description of Artificial Sequence:  Synthetic
accgaggguguguccucag

SEQ ID NO: 1381 - RNA, 19 nt, Artificial Sequence
  Description of Artificial Sequence:  Synthetic
uugaggaggcgcuggccca

SEQ ID NO: 1382 - RNA, 19 nt, Artificial Sequence
  Description of Artificial Sequence:  Synthetic
aggguguucagcacggagu

SEQ ID NO: 1383 - RNA, 19 nt, Artificial Sequence
  Description of Artificial Sequence:  Synthetic
augacgcugaucaugauga

SEQ ID NO: 1384 - RNA, 19 nt, Artificial Sequence
  Description of Artificial Sequence:  Synthetic
aagauggucauaaccacga

SEQ ID NO: 1385 - RNA, 19 nt, Artificial Sequence
  Description of Artificial Sequence:  Synthetic
uuguagagcaccaccaaga

SEQ ID NO: 1386 - RNA, 19 nt, Artificial Sequence
  Description of Artificial Sequence:  Synthetic
aacuuguagcagcgguacu

SEQ ID NO: 1387 - RNA, 19 nt, Artificial Sequence
  Description of Artificial Sequence:  Synthetic
aucaaccagccauggauga

SEQ ID NO: 1388 - RNA, 19 nt, Artificial Sequence
  Description of Artificial Sequence:  Synthetic
agcaucagugaagacauga

SEQ ID NO: 1389 - RNA, 19 nt, Artificial Sequence
  Description of Artificial Sequence:  Synthetic
uaggugaagaggaacagca

SEQ ID NO: 1390 - RNA, 19 nt, Artificial Sequence
  Description of Artificial Sequence:  Synthetic
acuuccccaagguagauau

SEQ ID NO: 1391 - RNA, 19 nt, Artificial Sequence
  Description of Artificial Sequence:  Synthetic
acauuguaggucuugagca

SEQ ID NO: 1392 - RNA, 19 nt, Artificial Sequence
  Description of Artificial Sequence:  Synthetic
gugggguaguccauggcca

SEQ ID NO: 1393 - RNA, 19 nt, Artificial Sequence
  Description of Artificial Sequence:  Synthetic
cagacagucagcaagaggg

SEQ ID NO: 1394 - RNA, 19 nt, Artificial Sequence
  Description of Artificial Sequence:  Synthetic
cccacugccccgaaguucc

SEQ ID NO: 1395 - RNA, 19 nt, Artificial Sequence
  Description of Artificial Sequence:  Synthetic
caguggaugcacaccaugc

SEQ ID NO: 1396 - RNA, 19 nt, Artificial Sequence
  Description of Artificial Sequence:  Synthetic
agcaccagagggcccuucc

SEQ ID NO: 1397 - RNA, 19 nt, Artificial Sequence
  Description of Artificial Sequence:  Synthetic
augagguaggccugcugca

SEQ ID NO: 1398 - RNA, 19 nt, Artificial Sequence
  Description of Artificial Sequence:  Synthetic
augagcgcacugaucauga

SEQ ID NO: 1399 - RNA, 19 nt, Artificial Sequence
  Description of Artificial Sequence:  Synthetic
uugaugaacacuagggcca

SEQ ID NO: 1400 - RNA, 19 nt, Artificial Sequence
  Description of Artificial Sequence:  Synthetic
gaccacucugggagguacu

SEQ ID NO: 1401 - RNA, 19 nt, Artificial Sequence
  Description of Artificial Sequence:  Synthetic
cccaggaugacccacgcgg

SEQ ID NO: 1402 - RNA, 19 nt, Artificial Sequence
  Description of Artificial Sequence:  Synthetic
ucauacacagagauggcgc

SEQ ID NO: 1403 - RNA, 19 nt, Artificial Sequence
  Description of Artificial Sequence:  Synthetic
cacagcacagccacgagau

SEQ ID NO: 1404 - RNA, 19 nt, Artificial Sequence
  Description of Artificial Sequence:  Synthetic
cucagaggcccuuugggac

SEQ ID NO: 1405 - RNA, 19 nt, Artificial Sequence
  Description of Artificial Sequence:  Synthetic
gcaguuucuaccagcauuc

SEQ ID NO: 1406 - RNA, 19 nt, Artificial Sequence
  Description of Artificial Sequence:  Synthetic
ggcucauuucucuccuggg

SEQ ID NO: 1407 - RNA, 19 nt, Artificial Sequence
  Description of Artificial Sequence:  Synthetic
aucagggcagggaauaugg

SEQ ID NO: 1408 - RNA, 19 nt, Artificial Sequence
  Description of Artificial Sequence:  Synthetic
accauggcagaugaguaua

SEQ ID NO: 1409 - RNA, 19 nt, Artificial Sequence
  Description of Artificial Sequence:  Synthetic
gccaugccaaccguccaca

SEQ ID NO: 1410 - RNA, 19 nt, Artificial Sequence
  Description of Artificial Sequence:  Synthetic
gaggagggguccagcuucg

SEQ ID NO: 1411 - RNA, 19 nt, Artificial Sequence
  Description of Artificial Sequence:  Synthetic
agcuggagggcacccugag

SEQ ID NO: 1412 - RNA, 19 nt, Artificial Sequence
  Description of Artificial Sequence:  Synthetic
aucuccgggucguagggga

SEQ ID NO: 1413 - RNA, 19 nt, Artificial Sequence
  Description of Artificial Sequence:  Synthetic
ucauaggagucuucuucca

SEQ ID NO: 1414 - RNA, 19 nt, Artificial Sequence
  Description of Artificial Sequence:  Synthetic
gaaggcuccccaaaacugu

SEQ ID NO: 1415 - RNA, 19 nt, Artificial Sequence
  Description of Artificial Sequence:  Synthetic
ucaaagacuucgggguaug

SEQ ID NO: 1416 - RNA, 19 nt, Artificial Sequence
  Description of Artificial Sequence:  Synthetic
uagccagucaagggaggcu

SEQ ID NO: 1417 - RNA, 19 nt, Artificial Sequence
  Description of Artificial Sequence:  Synthetic
uccagcuccuccccugggu

SEQ ID NO: 1418 - RNA, 19 nt, Artificial Sequence
  Description of Artificial Sequence:  Synthetic
ccccuuuccuccucuuccu

SEQ ID NO: 1419 - RNA, 19 nt, Artificial Sequence
  Description of Artificial Sequence:  Synthetic
ccgaggccaagcuucacgc

SEQ ID NO: 1420 - RNA, 19 nt, Artificial Sequence
  Description of Artificial Sequence:  Synthetic
cuguagaagaugaaguccc

SEQ ID NO: 1421 - RNA, 19 nt, Artificial Sequence
  Description of Artificial Sequence:  Synthetic
gccuugcccaccagcacac

SEQ ID NO: 1422 - RNA, 19 nt, Artificial Sequence
  Description of Artificial Sequence:  Synthetic
ccgcugcccguggcagccg

SEQ ID NO: 1423 - RNA, 19 nt, Artificial Sequence
  Description of Artificial Sequence:  Synthetic
agcgugguauuccaguccc

SEQ ID NO: 1424 - RNA, 19 nt, Artificial Sequence
  Description of Artificial Sequence:  Synthetic
auggccacgaagcaggcca

SEQ ID NO: 1425 - RNA, 19 nt, Artificial Sequence
  Description of Artificial Sequence:  Synthetic
agacacaagccaaugagga

SEQ ID NO: 1426 - RNA, 19 nt, Artificial Sequence
  Description of Artificial Sequence:  Synthetic
gcaagcagcaggaggguca

SEQ ID NO: 1427 - RNA, 19 nt, Artificial Sequence
  Description of Artificial Sequence:  Synthetic
agcgccuucuugaacacag

SEQ ID NO: 1428 - RNA, 19 nt, Artificial Sequence
  Description of Artificial Sequence:  Synthetic
gagauggggagggcgggca

SEQ ID NO: 1429 - RNA, 19 nt, Artificial Sequence
  Description of Artificial Sequence:  Synthetic
augagcccgaacgugaugg

SEQ ID NO: 1430 - RNA, 19 nt, Artificial Sequence
  Description of Artificial Sequence:  Synthetic
uccguggagaaguaaaaga

SEQ ID NO: 1431 - RNA, 19 nt, Artificial Sequence
  Description of Artificial Sequence:  Synthetic
aacggccgcaccagguugu

SEQ ID NO: 1432 - RNA, 19 nt, Artificial Sequence
  Description of Artificial Sequence:  Synthetic
gaggccaggguguccauga

SEQ ID NO: 1433 - RNA, 19 nt, Artificial Sequence
  Description of Artificial Sequence:  Synthetic
cagauguagagcugauggg

SEQ ID NO: 1434 - RNA, 19 nt, Artificial Sequence
  Description of Artificial Sequence:  Synthetic
guggcacaccaugucccuc

SEQ ID NO: 1435 - RNA, 19 nt, Artificial Sequence
  Description of Artificial Sequence:  Synthetic
cccugcagcuugcagccug

SEQ ID NO: 1436 - RNA, 19 nt, Artificial Sequence
  Description of Artificial Sequence:  Synthetic
cugcauccaaugaaaauuc

SEQ ID NO: 1437 - RNA, 19 nt, Artificial Sequence
  Description of Artificial Sequence:  Synthetic
gaguguaaaacuauacaac

SEQ ID NO: 1438 - RNA, 19 nt, Artificial Sequence
  Description of Artificial Sequence:  Synthetic
uaaaaauauauggcacuag

SEQ ID NO: 1439 - RNA, 19 nt, Artificial Sequence
  Description of Artificial Sequence:  Synthetic
uuaaggaaagaaaagucuu

SEQ ID NO: 1440 - RNA, 19 nt, Artificial Sequence
  Description of Artificial Sequence:  Synthetic
aaacacguacuuuauuuuu

SEQ ID NO: 1441 - RNA, 19 nt, Artificial Sequence
  Description of Artificial Sequence:  Synthetic
gccuccuccucaccaagua

SEQ ID NO: 1442 - RNA, 19 nt, Artificial Sequence
  Description of Artificial Sequence:  Synthetic
caccaaagagcugguucug

SEQ ID NO: 1443 - RNA, 19 nt, Artificial Sequence
  Description of Artificial Sequence:  Synthetic
uggugaugaaacagcuggc

SEQ ID NO: 1444 - RNA, 19 nt, Artificial Sequence
  Description of Artificial Sequence:  Synthetic
aaagcgggagccaaagucu

SEQ ID NO: 1445 - RNA, 19 nt, Artificial Sequence
  Description of Artificial Sequence:  Synthetic
ugaagcgaggcgcucccca

SEQ ID NO: 1446 - RNA, 19 nt, Artificial Sequence
  Description of Artificial Sequence:  Synthetic
ugcugugcuuccuguccgu

SEQ ID NO: 1447 - RNA, 19 nt, Artificial Sequence
  Description of Artificial Sequence:  Synthetic
aguucaucuggauaaaccu

SEQ ID NO: 1448 - RNA, 19 nt, Artificial Sequence
  Description of Artificial Sequence:  Synthetic
cccuaaucugaccuucuca

SEQ ID NO: 1449 - RNA, 19 nt, Artificial Sequence
  Description of Artificial Sequence:  Synthetic
cggaugcucuucuccccgc

SEQ ID NO: 1450 - RNA, 19 nt, Artificial Sequence
  Description of Artificial Sequence:  Synthetic
gcaucucagcccucaugcc

SEQ ID NO: 1451 - RNA, 19 nt, Artificial Sequence
  Description of Artificial Sequence:  Synthetic
cccgagcacacucuuugcg

SEQ ID NO: 1452 - RNA, 19 nt, Artificial Sequence
  Description of Artificial Sequence:  Synthetic
caggugccaggggccacuc

SEQ ID NO: 1453 - RNA, 19 nt, Artificial Sequence
  Description of Artificial Sequence:  Synthetic
cucuccagccagagcaccc

SEQ ID NO: 1454 - RNA, 19 nt, Artificial Sequence
  Description of Artificial Sequence:  Synthetic
guagggaacuggcuuuucc

SEQ ID NO: 1455 - RNA, 19 nt, Artificial Sequence
  Description of Artificial Sequence:  Synthetic
gcauugggaacacuccucg

SEQ ID NO: 1456 - RNA, 19 nt, Artificial Sequence
  Description of Artificial Sequence:  Synthetic
aaggacaucauggacaaag

SEQ ID NO: 1457 - RNA, 19 nt, Artificial Sequence
  Description of Artificial Sequence:  Synthetic
uaaaggcaauaaaauaaca

SEQ ID NO: 1458 - RNA, 19 nt, Artificial Sequence
  Description of Artificial Sequence:  Synthetic
agaacaggacucaguuucu

SEQ ID NO: 1459 - RNA, 19 nt, Artificial Sequence
  Description of Artificial Sequence:  Synthetic
agugugacugccguaacaa

SEQ ID NO: 1460 - RNA, 19 nt, Artificial Sequence
  Description of Artificial Sequence:  Synthetic
auuaagccacuucccagca

SEQ ID NO: 1461 - RNA, 19 nt, Artificial Sequence
  Description of Artificial Sequence:  Synthetic
cuauuuauugauauuacua

SEQ ID NO: 1462 - RNA, 19 nt, Artificial Sequence
  Description of Artificial Sequence:  Synthetic
uuucuaacaggacucaucu

SEQ ID NO: 1463 - RNA, 23 nt, Artificial Sequence
  Description of Artificial Sequence:  Synthetic
cagacuaugcagaugggagugaa

SEQ ID NO: 1464 - RNA, 23 nt, Artificial Sequence
  Description of Artificial Sequence:  Synthetic
guagcagaggaggaagaaguggc

SEQ ID NO: 1465 - RNA, 23 nt, Artificial Sequence
  Description of Artificial Sequence:  Synthetic
cugagguggaagaagaagaagcc

SEQ ID NO: 1466 - RNA, 23 nt, Artificial Sequence
  Description of Artificial Sequence:  Synthetic
agagagaaugucccaggucauga

SEQ ID NO: 1467 - RNA, 23 nt, Artificial Sequence
  Description of Artificial Sequence:  Synthetic
agaacuacaucaccgcucugcag

SEQ ID NO: 1468 - RNA, 23 nt, Artificial Sequence
  Description of Artificial Sequence:  Synthetic
auucuuuuggggcugacucugug

SEQ ID NO: 1469 - RNA, 23 nt, Artificial Sequence
  Description of Artificial Sequence:  Synthetic
ugaaguuggacagcaaaaccauu

SEQ ID NO: 1470 - RNA, 23 nt, Artificial Sequence
  Description of Artificial Sequence:  Synthetic
gaaguuggacagcaaaaccauug

SEQ ID NO: 1471 - RNA, 23 nt, Artificial Sequence
  Description of Artificial Sequence:  Synthetic
ccuggagccuuucuuugacucuc

SEQ ID NO: 1472 - RNA, 23 nt, Artificial Sequence
  Description of Artificial Sequence:  Synthetic
ggagccuuucuuugacucucugg

SEQ ID NO: 1473 - RNA, 23 nt, Artificial Sequence
  Description of Artificial Sequence:  Synthetic
agaaguucccugaugguuucugg

SEQ ID NO: 1474 - RNA, 23 nt, Artificial Sequence
  Description of Artificial Sequence:  Synthetic
aaugggugagguuaccaaccagu

SEQ ID NO: 1475 - RNA, 23 nt, Artificial Sequence
  Description of Artificial Sequence:  Synthetic
ucaccuuggacauggaagacugu

SEQ ID NO: 1476 - RNA, 23 nt, Artificial Sequence
  Description of Artificial Sequence:  Synthetic
ucaacccucaugaccauagccua

SEQ ID NO: 1477 - RNA, 23 nt, Artificial Sequence
  Description of Artificial Sequence:  Synthetic
ccuaacauuggugcaaagauugc

SEQ ID NO: 1478 - RNA, 23 nt, Artificial Sequence
  Description of Artificial Sequence:  Synthetic
uaugggaccugcuaaguguggaa

SEQ ID NO: 1479 - RNA, 23 nt, Artificial Sequence
  Description of Artificial Sequence:  Synthetic
cuaauggacgaccccaggguaac

SEQ ID NO: 1480 - RNA, 23 nt, Artificial Sequence
  Description of Artificial Sequence:  Synthetic
cuguugcacuccugaucuggaau

SEQ ID NO: 1481 - RNA, 23 nt, Artificial Sequence
  Description of Artificial Sequence:  Synthetic
gaaagcacagaaagggagucaca

SEQ ID NO: 1482 - RNA, 23 nt, Artificial Sequence
  Description of Artificial Sequence:  Synthetic
agggagucacaagacacuguugc

SEQ ID NO: 1483 - RNA, 23 nt, Artificial Sequence
  Description of Artificial Sequence:  Synthetic
gacuggaacacaaccauagccug

SEQ ID NO: 1484 - RNA, 23 nt, Artificial Sequence
  Description of Artificial Sequence:  Synthetic
uggaacacaaccauagccuguuu

SEQ ID NO: 1485 - RNA, 23 nt, Artificial Sequence
  Description of Artificial Sequence:  Synthetic
cuaccagauuugagggacgaggu

SEQ ID NO: 1486 - RNA, 23 nt, Artificial Sequence
  Description of Artificial Sequence:  Synthetic
uguaugcccaaagcgguagaauu

SEQ ID NO: 1487 - RNA, 23 nt, Artificial Sequence
  Description of Artificial Sequence:  Synthetic
uuacugaugaagaaacugaggcc

SEQ ID NO: 1488 - RNA, 23 nt, Artificial Sequence
  Description of Artificial Sequence:  Synthetic
agccagggagcaucauucauuua

SEQ ID NO: 1489 - RNA, 23 nt, Artificial Sequence
  Description of Artificial Sequence:  Synthetic
accgcuaugucuguagugggguu

SEQ ID NO: 1490 - RNA, 23 nt, Artificial Sequence
  Description of Artificial Sequence:  Synthetic
aagagcugacccucaaauacgga

SEQ ID NO: 1491 - RNA, 23 nt, Artificial Sequence
  Description of Artificial Sequence:  Synthetic
cacgacauucacugaggacacac

SEQ ID NO: 1492 - RNA, 23 nt, Artificial Sequence
  Description of Artificial Sequence:  Synthetic
gugcucaagaccuacaauguggc

SEQ ID NO: 1493 - RNA, 23 nt, Artificial Sequence
  Description of Artificial Sequence:  Synthetic
accuacaauguggccauggacua

SEQ ID NO: 1494 - RNA, 23 nt, Artificial Sequence
  Description of Artificial Sequence:  Synthetic
gaguguucccaaugcuuugucca

SEQ ID NO: 1495 - DNA, 21 bp, Artificial Sequence
  Description of Artificial Sequence: Synthetic
  misc_feature (1)..(19): ribonucleotide unmodified or modified as described for this sequence
gacuaugcagaugggagugtt

SEQ ID NO: 1496 - DNA, 21 bp, Artificial Sequence
  Description of Artificial Sequence:  Synthetic
  misc_feature (1)..(19): ribonucleotide unmodified or modified as described for this sequence
agcagaggaggaagaagugtt

SEQ ID NO: 1497 - DNA, 21 bp, Artificial Sequence
  Description of Artificial Sequence:  Synthetic
  misc_feature (1)..(19): ribonucleotide unmodified or modified as described for this sequence
gagguggaagaagaagaagtt

SEQ ID NO: 1498 - DNA, 21 bp, Artificial Sequence
  Description of Artificial Sequence:  Synthetic
  misc_feature (1)..(19): ribonucleotide unmodified or modified as described for this sequence
agagaaugucccaggucautt

SEQ ID NO: 1499 - DNA, 21 bp, Artificial Sequence
  Description of Artificial Sequence:  Synthetic
  misc_feature (1)..(19): ribonucleotide unmodified or modified as described for this sequence
aacuacaucaccgcucugctt

SEQ ID NO: 1500 - DNA, 21 bp, Artificial Sequence
  Description of Artificial Sequence:  Synthetic
  misc_feature (1)..(19): ribonucleotide unmodified or modified as described for this sequence
ucuuuuggggcugacucugtt

SEQ ID NO: 1501 - DNA, 21 bp, Artificial Sequence
  Description of Artificial Sequence:  Synthetic
  misc_feature (1)..(19): ribonucleotide unmodified or modified as described for this sequence
aaguuggacagcaaaaccatt

SEQ ID NO: 1502 - DNA, 21 bp, Artificial Sequence
  Description of Artificial Sequence:  Synthetic
  misc_feature (1)..(19): ribonucleotide unmodified or modified as described for this sequence
aguuggacagcaaaaccautt

SEQ ID NO: 1503 - DNA, 21 bp, Artificial Sequence
  Description of Artificial Sequence:  Synthetic
  misc_feature (1)..(19): ribonucleotide unmodified or modified as described for this sequence
cacucccaucugcauaguctt

SEQ ID NO: 1504 - DNA, 21 bp, Artificial Sequence
  Description of Artificial Sequence:  Synthetic
  misc_feature (1)..(19): ribonucleotide unmodified or modified as described for this sequence
cacuucuuccuccucugcutt

SEQ ID NO: 1505 - DNA, 21 bp, Artificial Sequence
  Description of Artificial Sequence:  Synthetic
  misc_feature (1)..(19): ribonucleotide unmodified or modified as described for this sequence
cuucuucuucuuccaccuctt

SEQ ID NO: 1506 - DNA, 21 bp, Artificial Sequence
  Description of Artificial Sequence:  Synthetic
  misc_feature (1)..(19): ribonucleotide unmodified or modified as described for this sequence
augaccugggacauucucutt

SEQ ID NO: 1507 - DNA, 21 bp, Artificial Sequence
  Description of Artificial Sequence:  Synthetic
  misc_feature (1)..(19): ribonucleotide unmodified or modified as described for this sequence
gcagagcggugauguaguutt

SEQ ID NO: 1508 - DNA, 21 bp, Artificial Sequence
  Description of Artificial Sequence:  Synthetic
  misc_feature (1)..(19): ribonucleotide unmodified or modified as described for this sequence
cagagucagccccaaaagatt

SEQ ID NO: 1509 - DNA, 21 bp, Artificial Sequence
  Description of Artificial Sequence:  Synthetic
  misc_feature (1)..(19): ribonucleotide unmodified or modified as described for this sequence
ugguuuugcuguccaacuutt

SEQ ID NO: 1510 - DNA, 21 bp, Artificial Sequence
  Description of Artificial Sequence:  Synthetic
  misc_feature (1)..(19): ribonucleotide unmodified or modified as described for this sequence
augguuuugcuguccaacutt

SEQ ID NO: 1511 - DNA, 21 bp, Artificial Sequence
  Description of Artificial Sequence:  Synthetic
  misc_feature (1)..(1): 5'-3 attached terminal deoxyabasic moiety
  misc_feature (3)..(4): 2'-deoxy-2'-fluoro
  misc_feature (6)..(6): 2'-deoxy-2'-fluoro
  misc_feature (8)..(8): 2'-deoxy-2'-fluoro
  misc_feature (12)..(12): 2'-deoxy-2'-fluoro
  misc_feature (18)..(18): 2'-deoxy-2'-fluoro
  misc_feature (1)..(19): ribonucleotide unmodified or modified as described for this sequence
  misc_feature (21)..(21): 3'-3 attached terminal deoxyabasic moiety
gacuaugcagaugggagugtt

SEQ ID NO: 1512 - DNA, 21 bp, Artificial Sequence
  Description of Artificial Sequence:  Synthetic
  misc_feature (1)..(1): 5'-3 attached terminal deoxyabasic moiety
  misc_feature (3)..(3): 2'-deoxy-2'-fluoro
  misc_feature (18)..(18): 2'-deoxy-2'-fluoro
  misc_feature (1)..(19): ribonucleotide unmodified or modified as described for this sequence
  misc_feature (21)..(21): 3'-3 attached terminal deoxyabasic moiety
agcagaggaggaagaagugtt

SEQ ID NO: 1513 - DNA, 21 bp, Artificial Sequence
  Description of Artificial Sequence:  Synthetic
  misc_feature: 2'-deoxy-2'-fluoro
  misc_feature (1)..(1): 5'-3 attached terminal deoxyabasic moiety
  misc_feature (5)..(5): 2'-deoxy-2'-fluoro
  misc_feature (1)..(19): ribonucleotide unmodified or modified as described for this sequence
  misc_feature (21)..(21): 3'-3 attached terminal deoxyabasic moiety
gagguggaagaagaagaagtt

SEQ ID NO: 1514 - DNA, 21 bp, Artificial Sequence
  Description of Artificial Sequence:  Synthetic
  misc_feature (1)..(1): 5'-3 attached terminal deoxyabasic moiety
  misc_feature (7)..(7): 2'-deoxy-2'-fluoro
  misc_feature (9)..(12): 2'-deoxy-2'-fluoro
  misc_feature (16)..(17): 2'-deoxy-2'-fluoro
  misc_feature (19)..(19): 2'-deoxy-2'-fluoro
  misc_feature (1)..(19): ribonucleotide unmodified or modified as described for this sequence
  misc_feature (21)..(21): 3'-3 attached terminal deoxyabasic moiety
agagaaugucccaggucautt

SEQ ID NO: 1515 - DNA, 21 bp, Artificial Sequence
  Description of Artificial Sequence:  Synthetic
  misc_feature (1)..(1): 5'-3 attached terminal deoxyabasic moiety
  misc_feature (3)..(4): 2'-deoxy-2'-fluoro
  misc_feature (6)..(6): 2'-deoxy-2'-fluoro
  misc_feature (8)..(9): 2'-deoxy-2'-fluoro
  misc_feature (11)..(12): 2'-deoxy-2'-fluoro
  misc_feature (14)..(17): 2'-deoxy-2'-fluoro
  misc_feature (19)..(19): 2'-deoxy-2'-fluoro
  misc_feature (1)..(19): ribonucleotide unmodified or modified as described for this sequence
  misc_feature (21)..(21): 3'-3 attached terminal deoxyabasic moiety
aacuacaucaccgcucugctt

SEQ ID NO: 1516 - DNA, 21 bp, Artificial Sequence
  Description of Artificial Sequence:  Synthetic
  misc_feature (1)..(1): 5'-3 attached terminal deoxyabasic moiety
  misc_feature (1)..(6): 2'-deoxy-2'-fluoro
  misc_feature (11)..(12): 2'-deoxy-2'-fluoro
  misc_feature (15)..(18): 2'-deoxy-2'-fluoro
  misc_feature (1)..(19): ribonucleotide unmodified or modified as described for this sequence
  misc_feature (21)..(21): 3'-3 attached terminal deoxyabasic moiety
ucuuuuggggcugacucugtt

SEQ ID NO: 1517 - DNA, 21 bp, Artificial Sequence
  Description of Artificial Sequence:  Synthetic
  misc_feature (1)..(1): 5'-3 attached terminal deoxyabasic moiety
  misc_feature (3)..(4): 2'-deoxy-2'-fluoro
  misc_feature (4)..(5): 2'-deoxy-2'-fluoro
  misc_feature (9)..(9): 2'-deoxy-2'-fluoro
  misc_feature (12)..(12): 2'-deoxy-2'-fluoro
  misc_feature (17)..(18): 2'-deoxy-2'-fluoro
  misc_feature (1)..(19): ribonucleotide unmodified or modified as described for this sequence
  misc_feature (21)..(21): 3'-3 attached terminal deoxyabasic moiety
aaguuggacagcaaaaccatt

SEQ ID NO: 1518 - DNA, 21 bp, Artificial Sequence
  Description of Artificial Sequence:  Synthetic
  misc_feature (1)..(1): 5'-3 attached terminal deoxyabasic moiety
  misc_feature (3)..(4): 2'-deoxy-2'-fluoro
  misc_feature (8)..(8): 2'-deoxy-2'-fluoro
  misc_feature (11)..(11): 2'-deoxy-2'-fluoro
  misc_feature (16)..(17): 2'-deoxy-2'-fluoro
  misc_feature (19)..(19): 2'-deoxy-2'-fluoro
  misc_feature (1)..(19): ribonucleotide unmodified or modified as described for this sequence
  misc_feature (21)..(21): 3'-3 attached terminal deoxyabasic moiety
aguuggacagcaaaaccautt

SEQ ID NO: 1519 - DNA, 21 bp, Artificial Sequence
  Description of Artificial Sequence:  Synthetic
  misc_feature (1)..(1): 2'-deoxy-2'-fluoro
  misc_feature (3)..(7): 2'-deoxy-2'-fluoro
  misc_feature (9)..(11): 2'-deoxy-2'-fluoro
  misc_feature (13)..(13): 2'-deoxy-2'-fluoro
  misc_feature (15)..(15): 2'-deoxy-2'-fluoro
  misc_feature (18)..(19): 2'-deoxy-2'-fluoro
  misc_feature (20)..(20): Phosphorothioate 3'-Internucleotide Linkage
  misc_feature (1)..(19): ribonucleotide unmodified or modified as described for this sequence
cacucccaucugcauaguctt

SEQ ID NO: 1520 - DNA, 21 bp, Artificial Sequence
  Description of Artificial Sequence:  Synthetic
  misc_feature (1)..(1): 2'-deoxy-2'-fluoro
  misc_feature (3)..(16): 2'-deoxy-2'-fluoro
  misc_feature (18)..(19): 2'-deoxy-2'-fluoro
  misc_feature (20)..(20): Phosphorothioate 3'-Internucleotide Linkage
  misc_feature (1)..(19): ribonucleotide unmodified or modified as described for this sequence
cacuucuuccuccucugcutt

SEQ ID NO: 1521 - DNA, 21 bp, Artificial Sequence
  Description of Artificial Sequence:  Synthetic
  misc_feature (1)..(14): 2'-deoxy-2'-fluoro
  misc_feature (16)..(19): 2'-deoxy-2'-fluoro
  misc_feature (20)..(20): Phosphorothioate 3'-Internucleotide Linkage
  misc_feature (1)..(19): ribonucleotide unmodified or modified as described for this sequence
cuucuucuucuuccaccuctt

SEQ ID NO: 1522 - DNA, 21 bp, Artificial Sequence
  Description of Artificial Sequence:  Synthetic
  misc_feature (2)..(2): 2'-deoxy-2'-fluoro
  misc_feature (5)..(7): 2'-deoxy-2'-fluoro
  misc_feature (12)..(12): 2'-deoxy-2'-fluoro
  misc_feature (14)..(19): 2'-deoxy-2'-fluoro
  misc_feature (20)..(20): Phosphorothioate 3'-Internucleotide Linkage
  misc_feature (1)..(19): ribonucleotide unmodified or modified as described for this sequence
augaccugggacauucucutt

SEQ ID NO: 1523 - DNA, 21 bp, Artificial Sequence
  Description of Artificial Sequence:  Synthetic
  misc_feature (2)..(2): 2'-deoxy-2'-fluoro
  misc_feature (7)..(7): 2'-deoxy-2'-fluoro
  misc_feature (10)..(10): 2'-deoxy-2'-fluoro
  misc_feature (13)..(13): 2'-deoxy-2'-fluoro
  misc_feature (15)..(15): 2'-deoxy-2'-fluoro
  misc_feature (18)..(19): 2'-deoxy-2'-fluoro
  misc_feature (20)..(20): Phosphorothioate 3'-Internucleotide Linkage
  misc_feature (1)..(19): ribonucleotide unmodified or modified as described for this sequence
gcagagcggugauguaguutt

SEQ ID NO: 1524 - DNA, 21 bp, Artificial Sequence
  Description of Artificial Sequence:  Synthetic
  misc_feature: 2'-deoxy-2'-fluoro
  misc_feature (1)..(1): 2'-deoxy-2'-fluoro
  misc_feature (6)..(7): 2'-deoxy-2'-fluoro
  misc_feature (10)..(13): 2'-deoxy-2'-fluoro
  misc_feature (20)..(20): Phosphorothioate 3'-Internucleotide Linkage
  misc_feature (1)..(19): ribonucleotide unmodified or modified as described for this sequence
cagagucagccccaaaagatt

SEQ ID NO: 1525 - DNA, 21 bp, Artificial Sequence
  Description of Artificial Sequence:  Synthetic
  misc_feature (1)..(1): 2'-deoxy-2'-fluoro
  misc_feature (4)..(7): 2'-deoxy-2'-fluoro
  misc_feature (9)..(10): 2'-deoxy-2'-fluoro
  misc_feature (12)..(14): 2'-deoxy-2'-fluoro
  misc_feature (17)..(19): 2'-deoxy-2'-fluoro
  misc_feature (20)..(20): Phosphorothioate 3'-Internucleotide Linkage
  misc_feature (1)..(19): ribonucleotide unmodified or modified as described for this sequence
ugguuuugcuguccaacuutt

SEQ ID NO: 1526 - DNA, 21 bp, Artificial Sequence
  Description of Artificial Sequence:  Synthetic
  misc_feature (2)..(2): 2'-deoxy-2'-fluoro
  misc_feature (5)..(8): 2'-deoxy-2'-fluoro
  misc_feature (10)..(11): 2'-deoxy-2'-fluoro
  misc_feature (13)..(15): 2'-deoxy-2'-fluoro
  misc_feature (18)..(19): 2'-deoxy-2'-fluoro
  misc_feature (20)..(20): Phosphorothioate 3'-Internucleotide Linkage
  misc_feature (1)..(19): ribonucleotide unmodified or modified as described for this sequence
augguuuugcuguccaacutt

SEQ ID NO: 1527 - DNA, 21 bp, Artificial Sequence
  Description of Artificial Sequence:  Synthetic
  misc_feature (1)..(1): 5'-3 attached terminal deoxyabasic moiety
  misc_feature (1)..(2): 2'-deoxy
  misc_feature (1)..(2): 2'-deoxy
  misc_feature (3)..(4): 2'-deoxy-2'-fluoro
  misc_feature (5)..(5): 2'-deoxy
  misc_feature (5)..(5): 2'-deoxy
  misc_feature (6)..(6): 2'-deoxy-2'-fluoro
  misc_feature (7)..(7): 2'-deoxy
  misc_feature (7)..(7): 2'-deoxy
  misc_feature (8)..(8): 2'-deoxy-2'-fluoro
  misc_feature (9)..(11): 2'-deoxy
  misc_feature (9)..(11): 2'-deoxy
  misc_feature (12)..(12): 2'-deoxy-2'-fluoro
  misc_feature (13)..(17): 2'-deoxy
  misc_feature (13)..(17): 2'-deoxy
  misc_feature (18)..(18): 2'-deoxy-2'-fluoro
  misc_feature (19)..(19): 2'-deoxy
  misc_feature (19)..(19): 2'-deoxy
  misc_feature (1)..(19): ribonucleotide unmodified or modified as described for this sequence
  misc_feature (21)..(21): 3'-3 attached terminal deoxyabasic moiety
gacuaugcagaugggagugtt

SEQ ID NO: 1528 - DNA, 21 bp, Artificial Sequence
  Description of Artificial Sequence:  Synthetic
  misc_feature (1)..(1): 5'-3 attached terminal deoxyabasic moiety
  misc_feature (1)..(2): 2'-deoxy
  misc_feature (1)..(2): 2'-deoxy
  misc_feature (3)..(3): 2'-deoxy-2'-fluoro
  misc_feature (4)..(17): 2'-deoxy
  misc_feature (4)..(17): 2'-deoxy
  misc_feature (18)..(18): 2'-deoxy-2'-fluoro
  misc_feature (19)..(19): 2'-deoxy
  misc_feature (19)..(19): 2'-deoxy
  misc_feature (1)..(19): ribonucleotide unmodified or modified as described for this sequence
  misc_feature (21)..(21): 3'-3 attached terminal deoxyabasic moiety
agcagaggaggaagaagugtt

SEQ ID NO: 1529 - DNA, 21 bp, Artificial Sequence
  Description of Artificial Sequence:  Synthetic
  misc_feature (1)..(1): 5'-3 attached terminal deoxyabasic moiety
  misc_feature (1)..(4): 2'-deoxy
  misc_feature (1)..(4): 2'-deoxy
  misc_feature (5)..(5): 2'-deoxy-2'-fluoro
  misc_feature (6)..(19): 2'-deoxy
  misc_feature (6)..(19): 2'-deoxy
  misc_feature (1)..(19): ribonucleotide unmodified or modified as described for this sequence
  misc_feature (21)..(21): 3'-3 attached terminal deoxyabasic moiety
gagguggaagaagaagaagtt

SEQ ID NO: 1530 - DNA, 21 bp, Artificial Sequence
  Description of Artificial Sequence:  Synthetic
  misc_feature (1)..(1): 5'-3 attached terminal deoxyabasic moiety
  misc_feature (1)..(6): 2'-deoxy
  misc_feature (1)..(6): 2'-deoxy
  misc_feature (7)..(7): 2'-deoxy-2'-fluoro
  misc_feature (8)..(8): 2'-deoxy
  misc_feature (8)..(8): 2'-deoxy
  misc_feature (9)..(12): 2'-deoxy-2'-fluoro
  misc_feature (13)..(15): 2'-deoxy
  misc_feature (13)..(15): 2'-deoxy
  misc_feature (16)..(17): 2'-deoxy-2'-fluoro
  misc_feature (18)..(18): 2'-deoxy
  misc_feature (18)..(18): 2'-deoxy
  misc_feature (19)..(19): 2'-deoxy-2'-fluoro
  misc_feature (1)..(19): ribonucleotide unmodified or modified as described for this sequence
  misc_feature (21)..(21): 3'-3 attached terminal deoxyabasic moiety
agagaaugucccaggucautt

SEQ ID NO: 1531 - DNA, 21 bp, Artificial Sequence
  Description of Artificial Sequence:  Synthetic
  misc_feature (1)..(1): 5'-3 attached terminal deoxyabasic moiety
  misc_feature (1)..(2): 2'-deoxy
  misc_feature (1)..(2): 2'-deoxy
  misc_feature (3)..(4): 2'-deoxy-2'-fluoro
  misc_feature (5)..(5): 2'-deoxy
  misc_feature (5)..(5): 2'-deoxy
  misc_feature (6)..(6): 2'-deoxy-2'-fluoro
  misc_feature (7)..(7): 2'-deoxy
  misc_feature (7)..(7): 2'-deoxy
  misc_feature (8)..(9): 2'-deoxy-2'-fluoro
  misc_feature (10)..(10): 2'-deoxy
  misc_feature (10)..(10): 2'-deoxy
  misc_feature (11)..(12): 2'-deoxy-2'-fluoro
  misc_feature (13)..(13): 2'-deoxy
  misc_feature (13)..(13): 2'-deoxy
  misc_feature (14)..(17): 2'-deoxy-2'-fluoro
  misc_feature (18)..(18): 2'-deoxy
  misc_feature (18)..(18): 2'-deoxy
  misc_feature (19)..(19): 2'-deoxy-2'-fluoro
  misc_feature (1)..(19): ribonucleotide unmodified or modified as described for this sequence
  misc_feature (21)..(21): 3'-3 attached terminal deoxyabasic moiety
aacuacaucaccgcucugctt

SEQ ID NO: 1532 - DNA, 21 bp, Artificial Sequence
  Description of Artificial Sequence:  Synthetic
  misc_feature (1)..(1): 5'-3 attached terminal deoxyabasic moiety
  misc_feature (1)..(6): 2'-deoxy-2'-fluoro
  misc_feature (7)..(10): 2'-deoxy
  misc_feature (7)..(10): 2'-deoxy
  misc_feature (11)..(12): 2'-deoxy-2'-fluoro
  misc_feature (13)..(14): 2'-deoxy
  misc_feature (13)..(14): 2'-deoxy
  misc_feature (15)..(18): 2'-deoxy-2'-fluoro
  misc_feature (19)..(19): 2'-deoxy
  misc_feature (19)..(19): 2'-deoxy
  misc_feature (1)..(19): ribonucleotide unmodified or modified as described for this sequence
  misc_feature (21)..(21): 3'-3 attached terminal deoxyabasic moiety
ucuuuuggggcugacucugtt

SEQ ID NO: 1533 - DNA, 21 bp, Artificial Sequence
  Description of Artificial Sequence:  Synthetic
  misc_feature (1)..(1): 5'-3 attached terminal deoxyabasic moiety
  misc_feature (1)..(3): 2'-deoxy
  misc_feature (1)..(3): 2'-deoxy
  misc_feature (4)..(5): 2'-deoxy-2'-fluoro
  misc_feature (6)..(8): 2'-deoxy
  misc_feature (6)..(8): 2'-deoxy
  misc_feature (9)..(9): 2'-deoxy-2'-fluoro
  misc_feature (10)..(11): 2'-deoxy
  misc_feature (10)..(11): 2'-deoxy
  misc_feature (12)..(12): 2'-deoxy-2'-fluoro
  misc_feature (13)..(16): 2'-deoxy
  misc_feature (13)..(16): 2'-deoxy
  misc_feature (17)..(18): 2'-deoxy-2'-fluoro
  misc_feature (19)..(19): 2'-deoxy
  misc_feature (19)..(19): 2'-deoxy
  misc_feature (1)..(19): ribonucleotide unmodified or modified as described for this sequence
  misc_feature (21)..(21): 3'-3 attached terminal deoxyabasic moiety
aaguuggacagcaaaaccatt

SEQ ID NO: 1534 - DNA, 21 bp, Artificial Sequence
  Description of Artificial Sequence:  Synthetic
  misc_feature (1)..(1): 5'-3 attached terminal deoxyabasic moiety
  misc_feature (1)..(2): 2'-deoxy
  misc_feature (1)..(2): 2'-deoxy
  misc_feature (3)..(4): 2'-deoxy-2'-fluoro
  misc_feature (5)..(7): 2'-deoxy
  misc_feature (5)..(7): 2'-deoxy
  misc_feature (8)..(8): 2'-deoxy-2'-fluoro
  misc_feature (9)..(10): 2'-deoxy
  misc_feature (9)..(10): 2'-deoxy
  misc_feature (11)..(11): 2'-deoxy-2'-fluoro
  misc_feature (12)..(15): 2'-deoxy
  misc_feature (12)..(15): 2'-deoxy
  misc_feature (16)..(17): 2'-deoxy-2'-fluoro
  misc_feature (18)..(18): 2'-deoxy
  misc_feature (18)..(18): 2'-deoxy
  misc_feature (19)..(19): 2'-deoxy-2'-fluoro
  misc_feature (1)..(19): ribonucleotide unmodified or modified as described for this sequence
  misc_feature (21)..(21): 3'-3 attached terminal deoxyabasic moiety
aguuggacagcaaaaccautt

SEQ ID NO: 1535 - DNA, 21 bp, Artificial Sequence
  Description of Artificial Sequence:  Synthetic
  misc_feature (1)..(1): 2'-deoxy-2'-fluoro
  misc_feature (2)..(2): 2'-deoxy
  misc_feature (2)..(2): 2'-deoxy
  misc_feature (3)..(7): 2'-deoxy-2'-fluoro
  misc_feature (8)..(8): 2'-deoxy
  misc_feature (8)..(8): 2'-deoxy
  misc_feature (9)..(11): 2'-deoxy-2'-fluoro
  misc_feature (12)..(12): 2'-deoxy
  misc_feature (12)..(12): 2'-deoxy
  misc_feature (13)..(13): 2'-deoxy-2'-fluoro
  misc_feature (14)..(14): 2'-deoxy
  misc_feature (14)..(14): 2'-deoxy
  misc_feature (15)..(15): 2'-deoxy-2'-fluoro
  misc_feature (16)..(17): 2'-deoxy
  misc_feature (16)..(17): 2'-deoxy
  misc_feature (18)..(19): 2'-deoxy-2'-fluoro
  misc_feature (20)..(20): Phosphorothioate 3'-Internucleotide Linkage
  misc_feature (1)..(19): ribonucleotide unmodified or modified as described for this sequence
cacucccaucugcauaguctt

SEQ ID NO: 1536 - DNA, 21 bp, Artificial Sequence
  Description of Artificial Sequence:  Synthetic
  misc_feature (1)..(1): 2'-deoxy-2'-fluoro
  misc_feature (2)..(2): 2'-deoxy
  misc_feature (2)..(2): 2'-deoxy
  misc_feature (3)..(16): 2'-deoxy-2'-fluoro
  misc_feature (17)..(17): 2'-deoxy
  misc_feature (17)..(17): 2'-deoxy
  misc_feature (18)..(19): 2'-deoxy-2'-fluoro
  misc_feature (20)..(20): Phosphorothioate 3'-Internucleotide Linkage
  misc_feature (1)..(19): ribonucleotide unmodified or modified as described for this sequence
cacuucuuccuccucugcutt

SEQ ID NO: 1537 - DNA, 21 bp, Artificial Sequence
  Description of Artificial Sequence:  Synthetic
  misc_feature (1)..(14): 2'-deoxy-2'-fluoro
  misc_feature (15)..(15): 2'-deoxy
  misc_feature (15)..(15): 2'-deoxy
  misc_feature (16)..(19): 2'-deoxy-2'-fluoro
  misc_feature (20)..(20): Phosphorothioate 3'-Internucleotide Linkage
  misc_feature (1)..(19): ribonucleotide unmodified or modified as described for this sequence
cuucuucuucuuccaccuctt

SEQ ID NO: 1538 - DNA, 21 bp, Artificial Sequence
  Description of Artificial Sequence:  Synthetic
  misc_feature (1)..(1): 2'-deoxy
  misc_feature (1)..(1): 2'-deoxy
  misc_feature (2)..(2): 2'-deoxy-2'-fluoro
  misc_feature (3)..(4): 2'-deoxy
  misc_feature (3)..(4): 2'-deoxy
  misc_feature (5)..(7): 2'-deoxy-2'-fluoro
  misc_feature (8)..(11): 2'-deoxy
  misc_feature (8)..(11): 2'-deoxy
  misc_feature (12)..(12): 2'-deoxy-2'-fluoro
  misc_feature (13)..(13): 2'-deoxy
  misc_feature (13)..(13): 2'-deoxy
  misc_feature (14)..(19): 2'-deoxy-2'-fluoro
  misc_feature (20)..(20): Phosphorothioate 3'-Internucleotide Linkage
  misc_feature (1)..(19): ribonucleotide unmodified or modified as described for this sequence
augaccugggacauucucutt

SEQ ID NO: 1539 - DNA, 21 bp, Artificial Sequence
  Description of Artificial Sequence:  Synthetic
  misc_feature (1)..(1): 2'-deoxy
  misc_feature (1)..(1): 2'-deoxy
  misc_feature (2)..(2): 2'-deoxy-2'-fluoro
  misc_feature (3)..(6): 2'-deoxy
  misc_feature (3)..(6): 2'-deoxy
  misc_feature (7)..(7): 2'-deoxy-2'-fluoro
  misc_feature (8)..(9): 2'-deoxy
  misc_feature (8)..(9): 2'-deoxy
  misc_feature (10)..(10): 2'-deoxy-2'-fluoro
  misc_feature (11)..(12): 2'-deoxy
  misc_feature (11)..(12): 2'-deoxy
  misc_feature (13)..(13): 2'-deoxy-2'-fluoro
  misc_feature (14)..(14): 2'-deoxy
  misc_feature (14)..(14): 2'-deoxy
  misc_feature (15)..(15): 2'-deoxy-2'-fluoro
  misc_feature (16)..(17): 2'-deoxy
  misc_feature (16)..(17): 2'-deoxy
  misc_feature (18)..(19): 2'-deoxy-2'-fluoro
  misc_feature (20)..(20): Phosphorothioate 3'-Internucleotide Linkage
  misc_feature (1)..(19): ribonucleotide unmodified or modified as described for this sequence
gcagagcggugauguaguutt

SEQ ID NO: 1540 - DNA, 21 bp, Artificial Sequence
  Description of Artificial Sequence:  Synthetic
  misc_feature (1)..(1): 2'-deoxy-2'-fluoro
  misc_feature (2)..(5): 2'-deoxy
  misc_feature (2)..(5): 2'-deoxy
  misc_feature (6)..(7): 2'-deoxy-2'-fluoro
  misc_feature (8)..(9): 2'-deoxy
  misc_feature (8)..(9): 2'-deoxy
  misc_feature (10)..(13): 2'-deoxy-2'-fluoro
  misc_feature (14)..(19): 2'-deoxy
  misc_feature (14)..(19): 2'-deoxy
  misc_feature (20)..(20): Phosphorothioate 3'-Internucleotide Linkage
  misc_feature (1)..(19): ribonucleotide unmodified or modified as described for this sequence
cagagucagccccaaaagatt

SEQ ID NO: 1541 - DNA, 21 bp, Artificial Sequence
  Description of Artificial Sequence:  Synthetic
  misc_feature (1)..(1): 2'-deoxy-2'-fluoro
  misc_feature (2)..(3): 2'-deoxy
  misc_feature (2)..(3): 2'-deoxy
  misc_feature (4)..(7): 2'-deoxy-2'-fluoro
  misc_feature (8)..(8): 2'-deoxy
  misc_feature (8)..(8): 2'-deoxy
  misc_feature (9)..(10): 2'-deoxy-2'-fluoro
  misc_feature (11)..(11): 2'-deoxy
  misc_feature (11)..(11): 2'-deoxy
  misc_feature (12)..(14): 2'-deoxy-2'-fluoro
  misc_feature (15)..(16): 2'-deoxy
  misc_feature (15)..(16): 2'-deoxy
  misc_feature (17)..(19): 2'-deoxy-2'-fluoro
  misc_feature (20)..(20): Phosphorothioate 3'-Internucleotide Linkage
  misc_feature (1)..(19): ribonucleotide unmodified or modified as described for this sequence
ugguuuugcuguccaacuutt

SEQ ID NO: 1542 - DNA, 21 bp, Artificial Sequence
  Description of Artificial Sequence:  Synthetic
  misc_feature (1)..(1): 2'-deoxy
  misc_feature (1)..(1): 2'-deoxy
  misc_feature (2)..(2): 2'-deoxy-2'-fluoro
  misc_feature (3)..(4): 2'-deoxy
  misc_feature (3)..(4): 2'-deoxy
  misc_feature (5)..(8): 2'-deoxy-2'-fluoro
  misc_feature (9)..(9): 2'-deoxy
  misc_feature (9)..(9): 2'-deoxy
  misc_feature (10)..(11): 2'-deoxy-2'-fluoro
  misc_feature (12)..(12): 2'-deoxy
  misc_feature (12)..(12): 2'-deoxy
  misc_feature (13)..(15): 2'-deoxy-2'-fluoro
  misc_feature (16)..(17): 2'-deoxy
  misc_feature (16)..(17): 2'-deoxy
  misc_feature (18)..(19): 2'-deoxy-2'-fluoro
  misc_feature (20)..(20): Phosphorothioate 3'-Internucleotide Linkage
  misc_feature (1)..(19): ribonucleotide unmodified or modified as described for this sequence
augguuuugcuguccaacutt

SEQ ID NO: 1543 - DNA, 21 bp, Artificial Sequence
  Description of Artificial Sequence:  Synthetic
  misc_feature (1)..(1): 5'-3 attached terminal deoxyabasic moiety
  misc_feature (1)..(2): 2'-O-methyl
  misc_feature (3)..(4): 2'-deoxy-2'-fluoro
  misc_feature (5)..(5): 2'-O-methyl
  misc_feature (6)..(6): 2'-deoxy-2'-fluoro
  misc_feature (7)..(7): 2'-O-methyl
  misc_feature (8)..(8): 2'-deoxy-2'-fluoro
  misc_feature (9)..(11): 2'-O-methyl
  misc_feature (12)..(12): 2'-deoxy-2'-fluoro
  misc_feature (13)..(17): 2'-O-methyl
  misc_feature (18)..(18): 2'-deoxy-2'-fluoro
  misc_feature (19)..(19): 2'-O-methyl
  misc_feature (1)..(19): ribonucleotide unmodified or modified as described for this sequence
  misc_feature (21)..(21): 3'-3 attached terminal deoxyabasic moiety
gacuaugcagaugggagugtt

SEQ ID NO: 1544 - DNA, 21 bp, Artificial Sequence
  Description of Artificial Sequence:  Synthetic
  misc_feature (1)..(1): 5'-3 attached terminal deoxyabasic moiety
  misc_feature (1)..(2): 2'-O-methyl
  misc_feature (3)..(3): 2'-deoxy-2'-fluoro
  misc_feature (4)..(17): 2'-O-methyl
  misc_feature (18)..(18): 2'-deoxy-2'-fluoro
  misc_feature (19)..(19): 2'-O-methyl
  misc_feature (1)..(19): ribonucleotide unmodified or modified as described for this sequence
  misc_feature (21)..(21): 3'-3 attached terminal deoxyabasic moiety
agcagaggaggaagaagugtt

SEQ ID NO: 1545 - DNA, 21 bp, Artificial Sequence
  Description of Artificial Sequence:  Synthetic
  misc_feature (1)..(1): 5'-3 attached terminal deoxyabasic moiety
  misc_feature (1)..(4): 2'-O-methyl
  misc_feature (5)..(5): 2'-deoxy-2'-fluoro
  misc_feature (6)..(19): 2'-O-methyl
  misc_feature (1)..(19): ribonucleotide unmodified or modified as described for this sequence
  misc_feature (21)..(21): 3'-3 attached terminal deoxyabasic moiety
gagguggaagaagaagaagtt

SEQ ID NO: 1546 - DNA, 21 bp, Artificial Sequence
  Description of Artificial Sequence:  Synthetic
  misc_feature (1)..(1): 5'-3 attached terminal deoxyabasic moiety
  misc_feature (1)..(6): 2'-O-methyl
  misc_feature (7)..(7): 2'-deoxy-2'-fluoro
  misc_feature (8)..(8): 2'-O-methyl
  misc_feature (9)..(12): 2'-deoxy-2'-fluoro
  misc_feature (13)..(15): 2'-O-methyl
  misc_feature (16)..(17): 2'-deoxy-2'-fluoro
  misc_feature (18)..(18): 2'-O-methyl
  misc_feature (19)..(19): 2'-deoxy-2'-fluoro
  misc_feature (1)..(19): ribonucleotide unmodified or modified as described for this sequence
  misc_feature (21)..(21): 3'-3 attached terminal deoxyabasic moiety
agagaaugucccaggucautt

SEQ ID NO: 1547 - DNA, 21 bp, Artificial Sequence
  Description of Artificial Sequence:  Synthetic
  misc_feature (1)..(1): 5'-3 attached terminal deoxyabasic moiety
  misc_feature (1)..(2): 2'-O-methyl
  misc_feature (3)..(4): 2'-deoxy-2'-fluoro
  misc_feature (5)..(5): 2'-O-methyl
  misc_feature (6)..(6): 2'-deoxy-2'-fluoro
  misc_feature (7)..(7): 2'-O-methyl
  misc_feature (8)..(9): 2'-deoxy-2'-fluoro
  misc_feature (10)..(10): 2'-O-methyl
  misc_feature (11)..(12): 2'-deoxy-2'-fluoro
  misc_feature (13)..(13): 2'-O-methyl
  misc_feature (14)..(17): 2'-deoxy-2'-fluoro
  misc_feature (18)..(18): 2'-O-methyl
  misc_feature (19)..(19): 2'-deoxy-2'-fluoro
  misc_feature (1)..(19): ribonucleotide unmodified or modified as described for this sequence
  misc_feature (21)..(21): 3'-3 attached terminal deoxyabasic moiety
aacuacaucaccgcucugctt

SEQ ID NO: 1548 - DNA, 21 bp, Artificial Sequence
  Description of Artificial Sequence:  Synthetic
  misc_feature (1)..(1): 5'-3 attached terminal deoxyabasic moiety
  misc_feature (1)..(6): 2'-deoxy-2'-fluoro
  misc_feature (7)..(10): 2'-O-methyl
  misc_feature (11)..(12): 2'-deoxy-2'-fluoro
  misc_feature (13)..(14): 2'-O-methyl
  misc_feature (15)..(18): 2'-deoxy-2'-fluoro
  misc_feature (19)..(19): 2'-O-methyl
  misc_feature (1)..(19): ribonucleotide unmodified or modified as described for this sequence
  misc_feature (21)..(21): 3'-3 attached terminal deoxyabasic moiety
ucuuuuggggcugacucugtt

SEQ ID NO: 1549 - DNA, 21 bp, Artificial Sequence
  Description of Artificial Sequence:  Synthetic
  misc_feature (1)..(1): 5'-3 attached terminal deoxyabasic moiety
  misc_feature (1)..(3): 2'-O-methyl
  misc_feature (4)..(5): 2'-deoxy-2'-fluoro
  misc_feature (6)..(8): 2'-O-methyl
  misc_feature (9)..(9): 2'-deoxy-2'-fluoro
  misc_feature (10)..(11): 2'-O-methyl
  misc_feature (12)..(12): 2'-deoxy-2'-fluoro
  misc_feature (13)..(16): 2'-O-methyl
  misc_feature (17)..(18): 2'-deoxy-2'-fluoro
  misc_feature (19)..(19): 2'-O-methyl
  misc_feature (1)..(19): ribonucleotide unmodified or modified as described for this sequence
  misc_feature (21)..(21): 3'-3 attached terminal deoxyabasic moiety
aaguuggacagcaaaaccatt

SEQ ID NO: 1550 - DNA, 21 bp, Artificial Sequence
  Description of Artificial Sequence:  Synthetic
  misc_feature (1)..(1): 5'-3 attached terminal deoxyabasic moiety
  misc_feature (1)..(2): 2'-O-methyl
  misc_feature (3)..(4): 2'-deoxy-2'-fluoro
  misc_feature (5)..(7): 2'-O-methyl
  misc_feature (8)..(8): 2'-deoxy-2'-fluoro
  misc_feature (9)..(10): 2'-O-methyl
  misc_feature (11)..(11): 2'-deoxy-2'-fluoro
  misc_feature (12)..(15): 2'-O-methyl
  misc_feature (16)..(17): 2'-deoxy-2'-fluoro
  misc_feature (18)..(18): 2'-O-methyl
  misc_feature (19)..(19): 2'-deoxy-2'-fluoro
  misc_feature (1)..(19): ribonucleotide unmodified or modified as described for this sequence
  misc_feature (21)..(21): 3'-3 attached terminal deoxyabasic moiety
aguuggacagcaaaaccautt

SEQ ID NO: 1551 - DNA, 21 bp, Artificial Sequence
  Description of Artificial Sequence:  Synthetic
  misc_feature (1)..(1): 2'-deoxy-2'-fluoro
  misc_feature (2)..(2): 2'-O-methyl
  misc_feature (3)..(7): 2'-deoxy-2'-fluoro
  misc_feature (8)..(8): 2'-O-methyl
  misc_feature (9)..(11): 2'-deoxy-2'-fluoro
  misc_feature (12)..(12): 2'-O-methyl
  misc_feature (13)..(13): 2'-deoxy-2'-fluoro
  misc_feature (14)..(14): 2'-O-methyl
  misc_feature (15)..(15): 2'-deoxy-2'-fluoro
  misc_feature (16)..(17): 2'-O-methyl
  misc_feature (18)..(19): 2'-deoxy-2'-fluoro
  misc_feature (20)..(20): Phosphorothioate 3'-Internucleotide Linkage
  misc_feature (1)..(19): ribonucleotide unmodified or modified as described for this sequence
cacucccaucugcauaguctt

SEQ ID NO: 1552 - DNA, 21 bp, Artificial Sequence
  Description of Artificial Sequence:  Synthetic
  misc_feature (1)..(1): 2'-deoxy-2'-fluoro
  misc_feature (2)..(2): 2'-O-methyl
  misc_feature (3)..(16): 2'-deoxy-2'-fluoro
  misc_feature (17)..(17): 2'-O-methyl
  misc_feature (18)..(19): 2'-deoxy-2'-fluoro
  misc_feature (20)..(20): Phosphorothioate 3'-Internucleotide Linkage
  misc_feature (1)..(19): ribonucleotide unmodified or modified as described for this sequence
cacuucuuccuccucugcutt

SEQ ID NO: 1553 - DNA, 21 bp, Artificial Sequence
  Description of Artificial Sequence:  Synthetic
  misc_feature (1)..(14): 2'-deoxy-2'-fluoro
  misc_feature (15)..(15): 2'-O-methyl
  misc_feature (16)..(19): 2'-deoxy-2'-fluoro
  misc_feature (20)..(20): Phosphorothioate 3'-Internucleotide Linkage
  misc_feature (1)..(19): ribonucleotide unmodified or modified as described for this sequence
cuucuucuucuuccaccuctt

SEQ ID NO: 1554 - DNA, 21 bp, Artificial Sequence
  Description of Artificial Sequence:  Synthetic
  misc_feature (1)..(1): 2'-O-methyl
  misc_feature (2)..(2): 2'-deoxy-2'-fluoro
  misc_feature (3)..(4): 2'-O-methyl
  misc_feature (5)..(7): 2'-deoxy-2'-fluoro
  misc_feature (8)..(11): 2'-O-methyl
  misc_feature (12)..(12): 2'-deoxy-2'-fluoro
  misc_feature (13)..(13): 2'-O-methyl
  misc_feature (14)..(19): 2'-deoxy-2'-fluoro
  misc_feature (20)..(20): Phosphorothioate 3'-Internucleotide Linkage
  misc_feature (1)..(19): ribonucleotide unmodified or modified as described for this sequence
augaccugggacauucucutt

SEQ ID NO: 1555 - DNA, 21 bp, Artificial Sequence
  Description of Artificial Sequence:  Synthetic
  misc_feature (1)..(1): 2'-O-methyl
  misc_feature (2)..(2): 2'-deoxy-2'-fluoro
  misc_feature (3)..(6): 2'-O-methyl
  misc_feature (7)..(7): 2'-deoxy-2'-fluoro
  misc_feature (8)..(9): 2'-O-methyl
  misc_feature (10)..(10): 2'-deoxy-2'-fluoro
  misc_feature (11)..(12): 2'-O-methyl
  misc_feature (13)..(13): 2'-deoxy-2'-fluoro
  misc_feature (14)..(14): 2'-O-methyl
  misc_feature (15)..(15): 2'-deoxy-2'-fluoro
  misc_feature (16)..(17): 2'-O-methyl
  misc_feature (18)..(19): 2'-deoxy-2'-fluoro
  misc_feature (20)..(20): Phosphorothioate 3'-Internucleotide Linkage
  misc_feature (1)..(19): ribonucleotide unmodified or modified as described for this sequence
gcagagcggugauguaguutt

SEQ ID NO: 1556 - DNA, 21 bp, Artificial Sequence
  Description of Artificial Sequence:  Synthetic
  misc_feature (1)..(1): 2'-deoxy-2'-fluoro
  misc_feature (2)..(5): 2'-O-methyl
  misc_feature (6)..(7): 2'-deoxy-2'-fluoro
  misc_feature (8)..(9): 2'-O-methyl
  misc_feature (10)..(13): 2'-deoxy-2'-fluoro
  misc_feature (14)..(19): 2'-O-methyl
  misc_feature (20)..(20): Phosphorothioate 3'-Internucleotide Linkage
  misc_feature (1)..(19): ribonucleotide unmodified or modified as described for this sequence
cagagucagccccaaaagatt

SEQ ID NO: 1557 - DNA, 21 bp, Artificial Sequence
  Description of Artificial Sequence:  Synthetic
  misc_feature (1)..(1): 2'-deoxy-2'-fluoro
  misc_feature (2)..(3): 2'-O-methyl
  misc_feature (4)..(7): 2'-deoxy-2'-fluoro
  misc_feature (8)..(8): 2'-O-methyl
  misc_feature (9)..(10): 2'-deoxy-2'-fluoro
  misc_feature (11)..(11): 2'-O-methyl
  misc_feature (12)..(14): 2'-deoxy-2'-fluoro
  misc_feature (15)..(16): 2'-O-methyl
  misc_feature (17)..(19): 2'-deoxy-2'-fluoro
  misc_feature (20)..(20): Phosphorothioate 3'-Internucleotide Linkage
  misc_feature (1)..(19): ribonucleotide unmodified or modified as described for this sequence
ugguuuugcuguccaacuutt

SEQ ID NO: 1558 - DNA, 21 bp, Artificial Sequence
  Description of Artificial Sequence:  Synthetic
  misc_feature (1)..(1): 2'-O-methyl
  misc_feature (2)..(2): 2'-deoxy-2'-fluoro
  misc_feature (3)..(4): 2'-O-methyl
  misc_feature (5)..(8): 2'-deoxy-2'-fluoro
  misc_feature (9)..(9): 2'-O-methyl
  misc_feature (10)..(11): 2'-deoxy-2'-fluoro
  misc_feature (12)..(12): 2'-O-methyl
  misc_feature (13)..(15): 2'-deoxy-2'-fluoro
  misc_feature (16)..(17): 2'-O-methyl
  misc_feature (18)..(19): 2'-deoxy-2'-fluoro
  misc_feature (20)..(20): Phosphorothioate 3'-Internucleotide Linkage
  misc_feature (1)..(19): ribonucleotide unmodified or modified as described for this sequence
augguuuugcuguccaacutt

SEQ ID NO: 1559 - DNA, 21 bp, Artificial Sequence
  Description of Artificial Sequence:  Synthetic
  misc_feature (1)..(1): 5'-3 attached terminal deoxyabasic moiety
  misc_feature (1)..(19): ribonucleotide unmodified or modified as described for this sequence
  misc_feature (21)..(21): 3'-3 attached terminal deoxyabasic moiety
gacuaugcagaugggagugtt

SEQ ID NO: 1560 - DNA, 21 bp, Artificial Sequence
  Description of Artificial Sequence:  Synthetic
  misc_feature (1)..(1): 5'-3 attached terminal deoxyabasic moiety
  misc_feature (1)..(19): ribonucleotide unmodified or modified as described for this sequence
  misc_feature (21)..(21): 3'-3 attached terminal deoxyabasic moiety
agcagaggaggaagaagugtt

SEQ ID NO: 1561 - DNA, 21 bp, Artificial Sequence
  Description of Artificial Sequence:  Synthetic
  misc_feature (1)..(1): 5'-3 attached terminal deoxyabasic moiety
  misc_feature (1)..(19): ribonucleotide unmodified or modified as described for this sequence
  misc_feature (21)..(21): 3'-3 attached terminal deoxyabasic moiety
gagguggaagaagaagaagtt

SEQ ID NO: 1562 - DNA, 21 bp, Artificial Sequence
  Description of Artificial Sequence:  Synthetic
  misc_feature (1)..(1): 5'-3 attached terminal deoxyabasic moiety
  misc_feature (1)..(19): ribonucleotide unmodified or modified as described for this sequence
  misc_feature (21)..(21): 3'-3 attached terminal deoxyabasic moiety
agagaaugucccaggucautt

SEQ ID NO: 1563 - DNA, 21 bp, Artificial Sequence
  Description of Artificial Sequence:  Synthetic
  misc_feature (1)..(1): 5'-3 attached terminal deoxyabasic moiety
  misc_feature (1)..(19): ribonucleotide unmodified or modified as described for this sequence
  misc_feature (21)..(21): 3'-3 attached terminal deoxyabasic moiety
aacuacaucaccgcucugctt

SEQ ID NO: 1564 - DNA, 21 bp, Artificial Sequence
  Description of Artificial Sequence:  Synthetic
  misc_feature (1)..(1): 5'-3 attached terminal deoxyabasic moiety
  misc_feature (1)..(19): ribonucleotide unmodified or modified as described for this sequence
  misc_feature (21)..(21): 3'-3 attached terminal deoxyabasic moiety
ucuuuuggggcugacucugtt

SEQ ID NO: 1565 - DNA, 21 bp, Artificial Sequence
  Description of Artificial Sequence:  Synthetic
  misc_feature (1)..(1): 5'-3 attached terminal deoxyabasic moiety
  misc_feature (1)..(19): ribonucleotide unmodified or modified as described for this sequence
  misc_feature (21)..(21): 3'-3 attached terminal deoxyabasic moiety
aaguuggacagcaaaaccatt

SEQ ID NO: 1566 - DNA, 21 bp, Artificial Sequence
  Description of Artificial Sequence:  Synthetic
  misc_feature (1)..(1): 5'-3 attached terminal deoxyabasic moiety
  misc_feature (1)..(19): ribonucleotide unmodified or modified as described for this sequence
  misc_feature (21)..(21): 3'-3 attached terminal deoxyabasic moiety
aguuggacagcaaaaccautt

SEQ ID NO: 1567 - DNA, 21 bp, Artificial Sequence
  Description of Artificial Sequence:  Synthetic
  misc_feature (20)..(20): Phosphorothioate 3'-Internucleotide Linkage
  misc_feature (1)..(19): ribonucleotide unmodified or modified as described for this sequence
cacucccaucugcauaguctt

SEQ ID NO: 1568 - DNA, 21 bp, Artificial Sequence
  Description of Artificial Sequence:  Synthetic
  misc_feature (20)..(20): Phosphorothioate 3'-Internucleotide Linkage
  misc_feature (1)..(19): ribonucleotide unmodified or modified as described for this sequence
cacuucuuccuccucugcutt

SEQ ID NO: 1569 - DNA, 21 bp, Artificial Sequence
  Description of Artificial Sequence:  Synthetic
  misc_feature (20)..(20): Phosphorothioate 3'-Internucleotide Linkage
  misc_feature (1)..(19): ribonucleotide unmodified or modified as described for this sequence
cuucuucuucuuccaccuctt

SEQ ID NO: 1570 - DNA, 21 bp, Artificial Sequence
  Description of Artificial Sequence:  Synthetic
  misc_feature (20)..(20): Phosphorothioate 3'-Internucleotide Linkage
  misc_feature (1)..(19): ribonucleotide unmodified or modified as described for this sequence
augaccugggacauucucutt

SEQ ID NO: 1571 - DNA, 21 bp, Artificial Sequence
  Description of Artificial Sequence:  Synthetic
  misc_feature (20)..(20): Phosphorothioate 3'-Internucleotide Linkage
  misc_feature (1)..(19): ribonucleotide unmodified or modified as described for this sequence
gcagagcggugauguaguutt

SEQ ID NO: 1572 - DNA, 21 bp, Artificial Sequence
  Description of Artificial Sequence:  Synthetic
  misc_feature (20)..(20): Phosphorothioate 3'-Internucleotide Linkage
  misc_feature (1)..(19): ribonucleotide unmodified or modified as described for this sequence
cagagucagccccaaaagatt

SEQ ID NO: 1573 - DNA, 21 bp, Artificial Sequence
  Description of Artificial Sequence:  Synthetic
  misc_feature (20)..(20): Phosphorothioate 3'-Internucleotide Linkage
  misc_feature (1)..(19): ribonucleotide unmodified or modified as described for this sequence
ugguuuugcuguccaacuutt

SEQ ID NO: 1574 - DNA, 21 bp, Artificial Sequence
  Description of Artificial Sequence:  Synthetic
  misc_feature (20)..(20): Phosphorothioate 3'-Internucleotide Linkage
  misc_feature (1)..(19): ribonucleotide unmodified or modified as described for this sequence
augguuuugcuguccaacutt

SEQ ID NO: 1575 - DNA, 21 bp, Artificial Sequence
  Description of Artificial Sequence:  Synthetic
  misc_feature (1)..(1): 2'-deoxy-2'-fluoro
  misc_feature (2)..(2): 2'-O-methyl
  misc_feature (3)..(7): 2'-deoxy-2'-fluoro
  misc_feature (8)..(8): 2'-O-methyl
  misc_feature (9)..(11): 2'-deoxy-2'-fluoro
  misc_feature (12)..(12): 2'-O-methyl
  misc_feature (13)..(13): 2'-deoxy-2'-fluoro
  misc_feature (14)..(14): 2'-O-methyl
  misc_feature (15)..(15): 2'-deoxy-2'-fluoro
  misc_feature (16)..(17): 2'-O-methyl
  misc_feature (18)..(19): 2'-deoxy-2'-fluoro
  misc_feature (1)..(19): ribonucleotide unmodified or modified as described for this sequence
  misc_feature (21)..(21): 3'-3 attached terminal deoxyabasic moiety
cacucccaucugcauaguctt

SEQ ID NO: 1576 - DNA, 21 bp, Artificial Sequence
  Description of Artificial Sequence:  Synthetic
  misc_feature (1)..(1): 2'-deoxy-2'-fluoro
  misc_feature (2)..(2): 2'-O-methyl
  misc_feature (3)..(16): 2'-deoxy-2'-fluoro
  misc_feature (17)..(17): 2'-O-methyl
  misc_feature (18)..(19): 2'-deoxy-2'-fluoro
  misc_feature (1)..(19): ribonucleotide unmodified or modified as described for this sequence
  misc_feature (21)..(21): 3'-3 attached terminal deoxyabasic moiety
cacuucuuccuccucugcutt

SEQ ID NO: 1577 - DNA, 21 bp, Artificial Sequence
  Description of Artificial Sequence:  Synthetic
  misc_feature (1)..(14): 2'-deoxy-2'-fluoro
  misc_feature (15)..(15): 2'-O-methyl
  misc_feature (16)..(19): 2'-deoxy-2'-fluoro
  misc_feature (1)..(19): ribonucleotide unmodified or modified as described for this sequence
  misc_feature (21)..(21): 3'-3 attached terminal deoxyabasic moiety
cuucuucuucuuccaccuctt

SEQ ID NO: 1578 - DNA, 21 bp, Artificial Sequence
  Description of Artificial Sequence:  Synthetic
  misc_feature (1)..(1): 2'-O-methyl
  misc_feature (2)..(2): 2'-deoxy-2'-fluoro
  misc_feature (3)..(4): 2'-O-methyl
  misc_feature (5)..(7): 2'-deoxy-2'-fluoro
  misc_feature (8)..(11): 2'-O-methyl
  misc_feature (12)..(12): 2'-deoxy-2'-fluoro
  misc_feature (13)..(13): 2'-O-methyl
  misc_feature (14)..(19): 2'-deoxy-2'-fluoro
  misc_feature (1)..(19): ribonucleotide unmodified or modified as described for this sequence
  misc_feature (21)..(21): 3'-3 attached terminal deoxyabasic moiety
augaccugggacauucucutt

SEQ ID NO: 1579 - DNA, 21 bp, Artificial Sequence
  Description of Artificial Sequence:  Synthetic
  misc_feature (1)..(1): 2'-O-methyl
  misc_feature (2)..(2): 2'-deoxy-2'-fluoro
  misc_feature (3)..(6): 2'-O-methyl
  misc_feature (7)..(7): 2'-deoxy-2'-fluoro
  misc_feature (8)..(9): 2'-O-methyl
  misc_feature (10)..(10): 2'-deoxy-2'-fluoro
  misc_feature (11)..(12): 2'-O-methyl
  misc_feature (13)..(13): 2'-deoxy-2'-fluoro
  misc_feature (14)..(14): 2'-O-methyl
  misc_feature (15)..(15): 2'-deoxy-2'-fluoro
  misc_feature (16)..(17): 2'-O-methyl
  misc_feature (18)..(19): 2'-deoxy-2'-fluoro
  misc_feature (1)..(19): ribonucleotide unmodified or modified as described for this sequence
  misc_feature (21)..(21): 3'-3 attached terminal deoxyabasic moiety
gcagagcggugauguaguutt

SEQ ID NO: 1580 - DNA, 21 bp, Artificial Sequence
  Description of Artificial Sequence:  Synthetic
  misc_feature (1)..(1): 2'-deoxy-2'-fluoro
  misc_feature (2)..(5): 2'-O-methyl
  misc_feature (6)..(7): 2'-deoxy-2'-fluoro
  misc_feature (8)..(9): 2'-O-methyl
  misc_feature (10)..(13): 2'-deoxy-2'-fluoro
  misc_feature (14)..(19): 2'-O-methyl
  misc_feature (1)..(19): ribonucleotide unmodified or modified as described for this sequence
  misc_feature (21)..(21): 3'-3 attached terminal deoxyabasic moiety
cagagucagccccaaaagatt

SEQ ID NO: 1581 - DNA, 21 bp, Artificial Sequence
  Description of Artificial Sequence:  Synthetic
  misc_feature (1)..(1): 2'-deoxy-2'-fluoro
  misc_feature (2)..(3): 2'-O-methyl
  misc_feature (4)..(7): 2'-deoxy-2'-fluoro
  misc_feature (8)..(8): 2'-O-methyl
  misc_feature (9)..(10): 2'-deoxy-2'-fluoro
  misc_feature (11)..(11): 2'-O-methyl
  misc_feature (12)..(14): 2'-deoxy-2'-fluoro
  misc_feature (15)..(16): 2'-O-methyl
  misc_feature (17)..(19): 2'-deoxy-2'-fluoro
  misc_feature (1)..(19): ribonucleotide unmodified or modified as described for this sequence
  misc_feature (21)..(21): 3'-3 attached terminal deoxyabasic moiety
ugguuuugcuguccaacuutt

SEQ ID NO: 1582 - DNA, 21 bp, Artificial Sequence
  Description of Artificial Sequence:  Synthetic
  misc_feature (1)..(1): 2'-O-methyl
  misc_feature (2)..(2): 2'-deoxy-2'-fluoro
  misc_feature (3)..(4): 2'-O-methyl
  misc_feature (5)..(8): 2'-deoxy-2'-fluoro
  misc_feature (9)..(9): 2'-O-methyl
  misc_feature (10)..(11): 2'-deoxy-2'-fluoro
  misc_feature (12)..(12): 2'-O-methyl
  misc_feature (13)..(15): 2'-deoxy-2'-fluoro
  misc_feature (16)..(17): 2'-O-methyl
  misc_feature (18)..(19): 2'-deoxy-2'-fluoro
  misc_feature (1)..(19): ribonucleotide unmodified or modified as described for this sequence
  misc_feature (21)..(21): 3'-3 attached terminal deoxyabasic moiety
augguuuugcuguccaacutt

SEQ ID NO: 1583 - DNA, 21 bp, Artificial Sequence
  Description of Artificial Sequence:  Synthetic
  misc_feature (1)..(19): ribonucleotide unmodified or modified as described for this sequence
  misc_feature (21)..(21): 3'-3 attached terminal deoxyabasic moiety
cacucccaucugcauaguctt

SEQ ID NO: 1584 - DNA, 21 bp, Artificial Sequence
  Description of Artificial Sequence:  Synthetic
  misc_feature (1)..(19): ribonucleotide unmodified or modified as described for this sequence
  misc_feature (21)..(21): 3'-3 attached terminal deoxyabasic moiety
cacuucuuccuccucugcutt

SEQ ID NO: 1585 - DNA, 21 bp, Artificial Sequence
  Description of Artificial Sequence:  Synthetic
  misc_feature (1)..(19): ribonucleotide unmodified or modified as described for this sequence
  misc_feature (21)..(21): 3'-3 attached terminal deoxyabasic moiety
cuucuucuucuuccaccuctt

SEQ ID NO: 1586 - DNA, 21 bp, Artificial Sequence
  Description of Artificial Sequence:  Synthetic
  misc_feature (1)..(19): ribonucleotide unmodified or modified as described for this sequence
  misc_feature (21)..(21): 3'-3 attached terminal deoxyabasic moiety
augaccugggacauucucutt

SEQ ID NO: 1587 - DNA, 21 bp, Artificial Sequence
  Description of Artificial Sequence:  Synthetic
  misc_feature (1)..(19): ribonucleotide unmodified or modified as described for this sequence
  misc_feature (21)..(21): 3'-3 attached terminal deoxyabasic moiety
gcagagcggugauguaguutt

SEQ ID NO: 1588 - DNA, 21 bp, Artificial Sequence
  Description of Artificial Sequence:  Synthetic
  misc_feature (1)..(19): ribonucleotide unmodified or modified as described for this sequence
  misc_feature (21)..(21): 3'-3 attached terminal deoxyabasic moiety
cagagucagccccaaaagatt

SEQ ID NO: 1589 - DNA, 21 bp, Artificial Sequence
  Description of Artificial Sequence:  Synthetic
  misc_feature (1)..(19): ribonucleotide unmodified or modified as described for this sequence
  misc_feature (21)..(21): 3'-3 attached terminal deoxyabasic moiety
ugguuuugcuguccaacuutt

SEQ ID NO: 1590 - DNA, 21 bp, Artificial Sequence
  Description of Artificial Sequence:  Synthetic
  misc_feature (1)..(19): ribonucleotide unmodified or modified as described for this sequence
  misc_feature (21)..(21): 3'-3 attached terminal deoxyabasic moiety
augguuuugcuguccaacutt

SEQ ID NO: 1591 - DNA, 21 bp, Artificial Sequence
  Description of Artificial Sequence:  Synthetic
  misc_feature (1)..(19): ribonucleotide unmodified or modified as described for this sequence
uggagccuuucuuugacuctt

SEQ ID NO: 1592 - DNA, 21 bp, Artificial Sequence
  Description of Artificial Sequence:  Synthetic
  misc_feature (1)..(19): ribonucleotide unmodified or modified as described for this sequence
agccuuucuuugacucucutt

SEQ ID NO: 1593 - DNA, 21 bp, Artificial Sequence
  Description of Artificial Sequence:  Synthetic
  misc_feature (1)..(19): ribonucleotide unmodified or modified as described for this sequence
aaguucccugaugguuucutt

SEQ ID NO: 1594 - DNA, 21 bp, Artificial Sequence
  Description of Artificial Sequence:  Synthetic
  misc_feature (1)..(19): ribonucleotide unmodified or modified as described for this sequence
ugggugagguuaccaaccatt

SEQ ID NO: 1595 - DNA, 21 bp, Artificial Sequence
  Description of Artificial Sequence:  Synthetic
  misc_feature (1)..(19): ribonucleotide unmodified or modified as described for this sequence
accuuggacauggaagacutt

SEQ ID NO: 1596 - DNA, 21 bp, Artificial Sequence
  Description of Artificial Sequence:  Synthetic
  misc_feature (1)..(19): ribonucleotide unmodified or modified as described for this sequence
aacccucaugaccauagcctt

SEQ ID NO: 1597 - DNA, 21 bp, Artificial Sequence
  Description of Artificial Sequence:  Synthetic
  misc_feature (1)..(19): ribonucleotide unmodified or modified as described for this sequence
uaacauuggugcaaagauutt

SEQ ID NO: 1598 - DNA, 21 bp, Artificial Sequence
  Description of Artificial Sequence:  Synthetic
  misc_feature (1)..(19): ribonucleotide unmodified or modified as described for this sequence
ugggaccugcuaaguguggtt

SEQ ID NO: 1599 - DNA, 21 bp, Artificial Sequence
  Description of Artificial Sequence:  Synthetic
  misc_feature (1)..(19): ribonucleotide unmodified or modified as described for this sequence
gagucaaagaaaggcuccatt

SEQ ID NO: 1600 - DNA, 21 bp, Artificial Sequence
  Description of Artificial Sequence:  Synthetic
  misc_feature (1)..(19): ribonucleotide unmodified or modified as described for this sequence
agagagucaaagaaaggcutt

SEQ ID NO: 1601 - DNA, 21 bp, Artificial Sequence
  Description of Artificial Sequence:  Synthetic
  misc_feature (1)..(19): ribonucleotide unmodified or modified as described for this sequence
agaaaccaucagggaacuutt

SEQ ID NO: 1602 - DNA, 21 bp, Artificial Sequence
  Description of Artificial Sequence:  Synthetic
  misc_feature (1)..(19): ribonucleotide unmodified or modified as described for this sequence
ugguugguaaccucacccatt

SEQ ID NO: 1603 - DNA, 21 bp, Artificial Sequence
  Description of Artificial Sequence:  Synthetic
  misc_feature (1)..(19): ribonucleotide unmodified or modified as described for this sequence
agucuuccauguccaaggutt

SEQ ID NO: 1604 - DNA, 21 bp, Artificial Sequence
  Description of Artificial Sequence:  Synthetic
  misc_feature (1)..(19): ribonucleotide unmodified or modified as described for this sequence
ggcuauggucaugaggguutt

SEQ ID NO: 1605 - DNA, 21 bp, Artificial Sequence
  Description of Artificial Sequence:  Synthetic
  misc_feature (1)..(19): ribonucleotide unmodified or modified as described for this sequence
aaucuuugcaccaauguuatt

SEQ ID NO: 1606 - DNA, 21 bp, Artificial Sequence
  Description of Artificial Sequence:  Synthetic
  misc_feature (1)..(19): ribonucleotide unmodified or modified as described for this sequence
ccacacuuagcaggucccatt

SEQ ID NO: 1607 - DNA, 21 bp, Artificial Sequence
  Description of Artificial Sequence:  Synthetic
  misc_feature (1)..(1): 5'-3 attached terminal deoxyabasic moiety
  misc_feature (1)..(1): 2'-deoxy-2'-fluoro
  misc_feature (6)..(14): 2'-deoxy-2'-fluoro
  misc_feature (17)..(19): 2'-deoxy-2'-fluoro
  misc_feature (1)..(19): ribonucleotide unmodified or modified as described for this sequence
  misc_feature (21)..(21): 3'-3 attached terminal deoxyabasic moiety
uggagccuuucuuugacuctt

SEQ ID NO: 1608 - DNA, 21 bp, Artificial Sequence
  Description of Artificial Sequence:  Synthetic
  misc_feature (1)..(1): 5'-3 attached terminal deoxyabasic moiety
  misc_feature (3)..(11): 2'-deoxy-2'-fluoro
  misc_feature (14)..(19): 2'-deoxy-2'-fluoro
  misc_feature (1)..(19): ribonucleotide unmodified or modified as described for this sequence
  misc_feature (21)..(21): 3'-3 attached terminal deoxyabasic moiety
agccuuucuuugacucucutt

SEQ ID NO: 1609 - DNA, 21 bp, Artificial Sequence
  Description of Artificial Sequence:  Synthetic
  misc_feature (1)..(1): 5'-3 attached terminal deoxyabasic moiety
  misc_feature (4)..(9): 2'-deoxy-2'-fluoro
  misc_feature (12)..(12): 2'-deoxy-2'-fluoro
  misc_feature (15)..(19): 2'-deoxy-2'-fluoro
  misc_feature (1)..(19): ribonucleotide unmodified or modified as described for this sequence
  misc_feature (21)..(21): 3'-3 attached terminal deoxyabasic moiety
aaguucccugaugguuucutt

SEQ ID NO: 1610 - DNA, 21 bp, Artificial Sequence
  Description of Artificial Sequence:  Synthetic
  misc_feature (1)..(1): 5'-3 attached terminal deoxyabasic moiety
  misc_feature (1)..(1): 2'-deoxy-2'-fluoro
  misc_feature (5)..(5): 2'-deoxy-2'-fluoro
  misc_feature (10)..(11): 2'-deoxy-2'-fluoro
  misc_feature (13)..(14): 2'-deoxy-2'-fluoro
  misc_feature (17)..(18): 2'-deoxy-2'-fluoro
  misc_feature (1)..(19): ribonucleotide unmodified or modified as described for this sequence
  misc_feature (21)..(21): 3'-3 attached terminal deoxyabasic moiety
ugggugagguuaccaaccatt

SEQ ID NO: 1611 - DNA, 21 bp, Artificial Sequence
  Description of Artificial Sequence:  Synthetic
  misc_feature (1)..(1): 5'-3 attached terminal deoxyabasic moiety
  misc_feature (2)..(5): 2'-deoxy-2'-fluoro
  misc_feature (9)..(9): 2'-deoxy-2'-fluoro
  misc_feature (11)..(11): 2'-deoxy-2'-fluoro
  misc_feature (18)..(19): 2'-deoxy-2'-fluoro
  misc_feature (1)..(19): ribonucleotide unmodified or modified as described for this sequence
  misc_feature (21)..(21): 3'-3 attached terminal deoxyabasic moiety
accuuggacauggaagacutt

SEQ ID NO: 1612 - DNA, 21 bp, Artificial Sequence
  Description of Artificial Sequence:  Synthetic
  misc_feature (1)..(1): 5'-3 attached terminal deoxyabasic moiety
  misc_feature (3)..(7): 2'-deoxy-2'-fluoro
  misc_feature (9)..(9): 2'-deoxy-2'-fluoro
  misc_feature (12)..(13): 2'-deoxy-2'-fluoro
  misc_feature (15)..(15): 2'-deoxy-2'-fluoro
  misc_feature (18)..(19): 2'-deoxy-2'-fluoro
  misc_feature (1)..(19): ribonucleotide unmodified or modified as described for this sequence
  misc_feature (21)..(21): 3'-3 attached terminal deoxyabasic moiety
aacccucaugaccauagcctt

SEQ ID NO: 1613 - DNA, 21 bp, Artificial Sequence
  Description of Artificial Sequence:  Synthetic
  misc_feature (1)..(1): 5'-3 attached terminal deoxyabasic moiety
  misc_feature (1)..(1): 2'-deoxy-2'-fluoro
  misc_feature (4)..(4): 2'-deoxy-2'-fluoro
  misc_feature (6)..(7): 2'-deoxy-2'-fluoro
  misc_feature (10)..(10): 2'-deoxy-2'-fluoro
  misc_feature (12)..(12): 2'-deoxy-2'-fluoro
  misc_feature (18)..(19): 2'-deoxy-2'-fluoro
  misc_feature (1)..(19): ribonucleotide unmodified or modified as described for this sequence
  misc_feature (21)..(21): 3'-3 attached terminal deoxyabasic moiety
uaacauuggugcaaagauutt

SEQ ID NO: 1614 - DNA, 21 bp, Artificial Sequence
  Description of Artificial Sequence:  Synthetic
  misc_feature (1)..(1): 5'-3 attached terminal deoxyabasic moiety
  misc_feature (1)..(1): 2'-deoxy-2'-fluoro
  misc_feature (6)..(8): 2'-deoxy-2'-fluoro
  misc_feature (10)..(11): 2'-deoxy-2'-fluoro
  misc_feature (15)..(15): 2'-deoxy-2'-fluoro
  misc_feature (17)..(17): 2'-deoxy-2'-fluoro
  misc_feature (1)..(19): ribonucleotide unmodified or modified as described for this sequence
  misc_feature (21)..(21): 3'-3 attached terminal deoxyabasic moiety
ugggaccugcuaaguguggtt

SEQ ID NO: 1615 - DNA, 21 bp, Artificial Sequence
  Description of Artificial Sequence:  Synthetic
  misc_feature (4)..(5): 2'-deoxy-2'-fluoro
  misc_feature (15)..(18): 2'-deoxy-2'-fluoro
  misc_feature (20)..(20): Phosphorothioate 3'-Internucleotide Linkage
  misc_feature (1)..(19): ribonucleotide unmodified or modified as described for this sequence
gagucaaagaaaggcuccatt

SEQ ID NO: 1616 - DNA, 21 bp, Artificial Sequence
  Description of Artificial Sequence:  Synthetic
  misc_feature (7)..(8): 2'-deoxy-2'-fluoro
  misc_feature (18)..(19): 2'-deoxy-2'-fluoro
  misc_feature (20)..(20): Phosphorothioate 3'-Internucleotide Linkage
  misc_feature (1)..(19): ribonucleotide unmodified or modified as described for this sequence
agagagucaaagaaaggcutt

SEQ ID NO: 1617 - DNA, 21 bp, Artificial Sequence
  Description of Artificial Sequence:  Synthetic
  misc_feature (6)..(7): 2'-deoxy-2'-fluoro
  misc_feature (9)..(10): 2'-deoxy-2'-fluoro
  misc_feature (17)..(19): 2'-deoxy-2'-fluoro
  misc_feature (20)..(20): Phosphorothioate 3'-Internucleotide Linkage
  misc_feature (1)..(19): ribonucleotide unmodified or modified as described for this sequence
agaaaccaucagggaacuutt

SEQ ID NO: 1618 - DNA, 21 bp, Artificial Sequence
  Description of Artificial Sequence:  Synthetic
  misc_feature (1)..(1): 2'-deoxy-2'-fluoro
  misc_feature (4)..(5): 2'-deoxy-2'-fluoro
  misc_feature (8)..(8): 2'-deoxy-2'-fluoro
  misc_feature (11)..(14): 2'-deoxy-2'-fluoro
  misc_feature (16)..(18): 2'-deoxy-2'-fluoro
  misc_feature (20)..(20): Phosphorothioate 3'-Internucleotide Linkage
  misc_feature (1)..(19): ribonucleotide unmodified or modified as described for this sequence
ugguugguaaccucacccatt

SEQ ID NO: 1619 - DNA, 21 bp, Artificial Sequence
  Description of Artificial Sequence:  Synthetic
  misc_feature (3)..(8): 2'-deoxy-2'-fluoro
  misc_feature (10)..(10): 2'-deoxy-2'-fluoro
  misc_feature (12)..(14): 2'-deoxy-2'-fluoro
  misc_feature (19)..(19): 2'-deoxy-2'-fluoro
  misc_feature (20)..(20): Phosphorothioate 3'-Internucleotide Linkage
  misc_feature (1)..(19): ribonucleotide unmodified or modified as described for this sequence
agucuuccauguccaaggutt

SEQ ID NO: 1620 - DNA, 21 bp, Artificial Sequence
  Description of Artificial Sequence:  Synthetic
  misc_feature (3)..(4): 2'-deoxy-2'-fluoro
  misc_feature (6)..(6): 2'-deoxy-2'-fluoro
  misc_feature (9)..(10): 2'-deoxy-2'-fluoro
  misc_feature (12)..(12): 2'-deoxy-2'-fluoro
  misc_feature (18)..(19): 2'-deoxy-2'-fluoro
  misc_feature (20)..(20): Phosphorothioate 3'-Internucleotide Linkage
  misc_feature (1)..(19): ribonucleotide unmodified or modified as described for this sequence
ggcuauggucaugaggguutt

SEQ ID NO: 1621 - DNA, 21 bp, Artificial Sequence
  Description of Artificial Sequence:  Synthetic
  misc_feature (3)..(7): 2'-deoxy-2'-fluoro
  misc_feature (9)..(9): 2'-deoxy-2'-fluoro
  misc_feature (11)..(12): 2'-deoxy-2'-fluoro
  misc_feature (15)..(15): 2'-deoxy-2'-fluoro
  misc_feature (17)..(18): 2'-deoxy-2'-fluoro
  misc_feature (20)..(20): Phosphorothioate 3'-Internucleotide Linkage
  misc_feature (1)..(19): ribonucleotide unmodified or modified as described for this sequence
aaucuuugcaccaauguuatt

SEQ ID NO: 1622 - DNA, 21 bp, Artificial Sequence
  Description of Artificial Sequence:  Synthetic
  misc_feature (1)..(2): 2'-deoxy-2'-fluoro
  misc_feature (4)..(4): 2'-deoxy-2'-fluoro
  misc_feature (6)..(8): 2'-deoxy-2'-fluoro
  misc_feature (11)..(11): 2'-deoxy-2'-fluoro
  misc_feature (15)..(18): 2'-deoxy-2'-fluoro
  misc_feature (20)..(20): Phosphorothioate 3'-Internucleotide Linkage
  misc_feature (1)..(19): ribonucleotide unmodified or modified as described for this sequence
ccacacuuagcaggucccatt

SEQ ID NO: 1623 - DNA, 21 bp, Artificial Sequence
  Description of Artificial Sequence:  Synthetic
  misc_feature (1)..(1): 5'-3 attached terminal deoxyabasic moiety
  misc_feature (1)..(1): 2'-deoxy-2'-fluoro
  misc_feature (2)..(5): 2'-deoxy
  misc_feature (2)..(5): 2'-deoxy
  misc_feature (6)..(14): 2'-deoxy-2'-fluoro
  misc_feature (15)..(16): 2'-deoxy
  misc_feature (15)..(16): 2'-deoxy
  misc_feature (17)..(19): 2'-deoxy-2'-fluoro
  misc_feature (1)..(19): ribonucleotide unmodified or modified as described for this sequence
  misc_feature (21)..(21): 3'-3 attached terminal deoxyabasic moiety
uggagccuuucuuugacuctt

SEQ ID NO: 1624 - DNA, 21 bp, Artificial Sequence
  Description of Artificial Sequence:  Synthetic
  misc_feature (1)..(1): 5'-3 attached terminal deoxyabasic moiety
  misc_feature (1)..(2): 2'-deoxy
  misc_feature (1)..(2): 2'-deoxy
  misc_feature (3)..(11): 2'-deoxy-2'-fluoro
  misc_feature (12)..(13): 2'-deoxy
  misc_feature (12)..(13): 2'-deoxy
  misc_feature (14)..(19): 2'-deoxy-2'-fluoro
  misc_feature (1)..(19): ribonucleotide unmodified or modified as described for this sequence
  misc_feature (21)..(21): 3'-3 attached terminal deoxyabasic moiety
agccuuucuuugacucucutt

SEQ ID NO: 1625 - DNA, 21 bp, Artificial Sequence
  Description of Artificial Sequence:  Synthetic
  misc_feature (1)..(1): 5'-3 attached terminal deoxyabasic moiety
  misc_feature (1)..(3): 2'-deoxy
  misc_feature (1)..(3): 2'-deoxy
  misc_feature (4)..(9): 2'-deoxy-2'-fluoro
  misc_feature (10)..(11): 2'-deoxy
  misc_feature (10)..(11): 2'-deoxy
  misc_feature (12)..(12): 2'-deoxy-2'-fluoro
  misc_feature (13)..(14): 2'-deoxy
  misc_feature (13)..(14): 2'-deoxy
  misc_feature (15)..(19): 2'-deoxy-2'-fluoro
  misc_feature (1)..(19): ribonucleotide unmodified or modified as described for this sequence
  misc_feature (21)..(21): 3'-3 attached terminal deoxyabasic moiety
aaguucccugaugguuucutt

SEQ ID NO: 1626 - DNA, 21 bp, Artificial Sequence
  Description of Artificial Sequence:  Synthetic
  misc_feature (1)..(1): 5'-3 attached terminal deoxyabasic moiety
  misc_feature (1)..(1): 2'-deoxy-2'-fluoro
  misc_feature (2)..(4): 2'-deoxy
  misc_feature (2)..(4): 2'-deoxy
  misc_feature (5)..(5): 2'-deoxy-2'-fluoro
  misc_feature (6)..(9): 2'-deoxy
  misc_feature (6)..(9): 2'-deoxy
  misc_feature (10)..(11): 2'-deoxy-2'-fluoro
  misc_feature (12)..(12): 2'-deoxy
  misc_feature (12)..(12): 2'-deoxy
  misc_feature (13)..(14): 2'-deoxy-2'-fluoro
  misc_feature (15)..(16): 2'-deoxy
  misc_feature (15)..(16): 2'-deoxy
  misc_feature (17)..(18): 2'-deoxy-2'-fluoro
  misc_feature (19)..(19): 2'-deoxy
  misc_feature (19)..(19): 2'-deoxy
  misc_feature (1)..(19): ribonucleotide unmodified or modified as described for this sequence
  misc_feature (21)..(21): 3'-3 attached terminal deoxyabasic moiety
ugggugagguuaccaaccatt

SEQ ID NO: 1627 - DNA, 21 bp, Artificial Sequence
  Description of Artificial Sequence:  Synthetic
  misc_feature (1)..(1): 5'-3 attached terminal deoxyabasic moiety
  misc_feature (1)..(1): 2'-deoxy
  misc_feature (1)..(1): 2'-deoxy
  misc_feature (2)..(5): 2'-deoxy-2'-fluoro
  misc_feature (6)..(8): 2'-deoxy
  misc_feature (6)..(8): 2'-deoxy
  misc_feature (9)..(9): 2'-deoxy-2'-fluoro
  misc_feature (10)..(10): 2'-deoxy
  misc_feature (10)..(10): 2'-deoxy
  misc_feature (11)..(11): 2'-deoxy-2'-fluoro
  misc_feature (12)..(17): 2'-deoxy
  misc_feature (12)..(17): 2'-deoxy
  misc_feature (18)..(19): 2'-deoxy-2'-fluoro
  misc_feature (1)..(19): ribonucleotide unmodified or modified as described for this sequence
  misc_feature (21)..(21): 3'-3 attached terminal deoxyabasic moiety
accuuggacauggaagacutt

SEQ ID NO: 1628 - DNA, 21 bp, Artificial Sequence
  Description of Artificial Sequence:  Synthetic
  misc_feature (1)..(1): 5'-3 attached terminal deoxyabasic moiety
  misc_feature (1)..(2): 2'-deoxy
  misc_feature (1)..(2): 2'-deoxy
  misc_feature (3)..(7): 2'-deoxy-2'-fluoro
  misc_feature (8)..(8): 2'-deoxy
  misc_feature (8)..(8): 2'-deoxy
  misc_feature (9)..(9): 2'-deoxy-2'-fluoro
  misc_feature (10)..(11): 2'-deoxy
  misc_feature (10)..(11): 2'-deoxy
  misc_feature (12)..(13): 2'-deoxy-2'-fluoro
  misc_feature (14)..(14): 2'-deoxy
  misc_feature (14)..(14): 2'-deoxy
  misc_feature (15)..(15): 2'-deoxy-2'-fluoro
  misc_feature (16)..(17): 2'-deoxy
  misc_feature (16)..(17): 2'-deoxy
  misc_feature (18)..(19): 2'-deoxy-2'-fluoro
  misc_feature (1)..(19): ribonucleotide unmodified or modified as described for this sequence
  misc_feature (21)..(21): 3'-3 attached terminal deoxyabasic moiety
aacccucaugaccauagcctt

SEQ ID NO: 1629 - DNA, 21 bp, Artificial Sequence
  Description of Artificial Sequence:  Synthetic
  misc_feature (1)..(1): 5'-3 attached terminal deoxyabasic moiety
  misc_feature (1)..(1): 2'-deoxy-2'-fluoro
  misc_feature (2)..(3): 2'-deoxy
  misc_feature (2)..(3): 2'-deoxy
  misc_feature (4)..(4): 2'-deoxy-2'-fluoro
  misc_feature (5)..(5): 2'-deoxy
  misc_feature (5)..(5): 2'-deoxy
  misc_feature (6)..(7): 2'-deoxy-2'-fluoro
  misc_feature (8)..(9): 2'-deoxy
  misc_feature (8)..(9): 2'-deoxy
  misc_feature (10)..(10): 2'-deoxy-2'-fluoro
  misc_feature (11)..(11): 2'-deoxy
  misc_feature (11)..(11): 2'-deoxy
  misc_feature (12)..(12): 2'-deoxy-2'-fluoro
  misc_feature (13)..(17): 2'-deoxy
  misc_feature (13)..(17): 2'-deoxy
  misc_feature (18)..(19): 2'-deoxy-2'-fluoro
  misc_feature (1)..(19): ribonucleotide unmodified or modified as described for this sequence
  misc_feature (21)..(21): 3'-3 attached terminal deoxyabasic moiety
uaacauuggugcaaagauutt

SEQ ID NO: 1630 - DNA, 21 bp, Artificial Sequence
  Description of Artificial Sequence:  Synthetic
  misc_feature (1)..(1): 5'-3 attached terminal deoxyabasic moiety
  misc_feature (1)..(1): 2'-deoxy-2'-fluoro
  misc_feature (2)..(5): 2'-deoxy
  misc_feature (2)..(5): 2'-deoxy
  misc_feature (6)..(8): 2'-deoxy-2'-fluoro
  misc_feature (9)..(9): 2'-deoxy
  misc_feature (9)..(9): 2'-deoxy
  misc_feature (10)..(11): 2'-deoxy-2'-fluoro
  misc_feature (12)..(14): 2'-deoxy
  misc_feature (12)..(14): 2'-deoxy
  misc_feature (15)..(15): 2'-deoxy-2'-fluoro
  misc_feature (16)..(16): 2'-deoxy
  misc_feature (16)..(16): 2'-deoxy
  misc_feature (17)..(17): 2'-deoxy-2'-fluoro
  misc_feature (18)..(19): 2'-deoxy
  misc_feature (18)..(19): 2'-deoxy
  misc_feature (1)..(19): ribonucleotide unmodified or modified as described for this sequence
  misc_feature (21)..(21): 3'-3 attached terminal deoxyabasic moiety
ugggaccugcuaaguguggtt

SEQ ID NO: 1631 - DNA, 21 bp, Artificial Sequence
  Description of Artificial Sequence:  Synthetic
  misc_feature (1)..(3): 2'-deoxy
  misc_feature (1)..(3): 2'-deoxy
  misc_feature (4)..(5): 2'-deoxy-2'-fluoro
  misc_feature (6)..(14): 2'-deoxy
  misc_feature (6)..(14): 2'-deoxy
  misc_feature (15)..(18): 2'-deoxy-2'-fluoro
  misc_feature (19)..(19): 2'-deoxy
  misc_feature (19)..(19): 2'-deoxy
  misc_feature (20)..(20): Phosphorothioate 3'-Internucleotide Linkage
  misc_feature (1)..(19): ribonucleotide unmodified or modified as described for this sequence
gagucaaagaaaggcuccatt

SEQ ID NO: 1632 - DNA, 21 bp, Artificial Sequence
  Description of Artificial Sequence:  Synthetic
  misc_feature (1)..(6): 2'-deoxy
  misc_feature (1)..(6): 2'-deoxy
  misc_feature (7)..(8): 2'-deoxy-2'-fluoro
  misc_feature (9)..(17): 2'-deoxy
  misc_feature (9)..(17): 2'-deoxy
  misc_feature (18)..(19): 2'-deoxy-2'-fluoro
  misc_feature (20)..(20): Phosphorothioate 3'-Internucleotide Linkage
  misc_feature (1)..(19): ribonucleotide unmodified or modified as described for this sequence
agagagucaaagaaaggcutt

SEQ ID NO: 1633 - DNA, 21 bp, Artificial Sequence
  Description of Artificial Sequence:  Synthetic
  misc_feature (1)..(5): 2'-deoxy
  misc_feature (1)..(5): 2'-deoxy
  misc_feature (6)..(7): 2'-deoxy-2'-fluoro
  misc_feature (8)..(8): 2'-deoxy
  misc_feature (8)..(8): 2'-deoxy
  misc_feature (9)..(10): 2'-deoxy-2'-fluoro
  misc_feature (11)..(16): 2'-deoxy
  misc_feature (11)..(16): 2'-deoxy
  misc_feature (17)..(19): 2'-deoxy-2'-fluoro
  misc_feature (20)..(20): Phosphorothioate 3'-Internucleotide Linkage
  misc_feature (1)..(19): ribonucleotide unmodified or modified as described for this sequence
agaaaccaucagggaacuutt

SEQ ID NO: 1634 - DNA, 21 bp, Artificial Sequence
  Description of Artificial Sequence:  Synthetic
  misc_feature (1)..(1): 2'-deoxy-2'-fluoro
  misc_feature (2)..(3): 2'-deoxy
  misc_feature (2)..(3): 2'-deoxy
  misc_feature (4)..(5): 2'-deoxy-2'-fluoro
  misc_feature (6)..(7): 2'-deoxy
  misc_feature (6)..(7): 2'-deoxy
  misc_feature (8)..(8): 2'-deoxy-2'-fluoro
  misc_feature (9)..(10): 2'-deoxy
  misc_feature (9)..(10): 2'-deoxy
  misc_feature (11)..(14): 2'-deoxy-2'-fluoro
  misc_feature (15)..(15): 2'-deoxy
  misc_feature (15)..(15): 2'-deoxy
  misc_feature (16)..(18): 2'-deoxy-2'-fluoro
  misc_feature (19)..(19): 2'-deoxy
  misc_feature (19)..(19): 2'-deoxy
  misc_feature (20)..(20): Phosphorothioate 3'-Internucleotide Linkage
  misc_feature (1)..(19): ribonucleotide unmodified or modified as described for this sequence
ugguugguaaccucacccatt

SEQ ID NO: 1635 - DNA, 21 bp, Artificial Sequence
  Description of Artificial Sequence:  Synthetic
  misc_feature (1)..(2): 2'-deoxy
  misc_feature (1)..(2): 2'-deoxy
  misc_feature (3)..(8): 2'-deoxy-2'-fluoro
  misc_feature (9)..(9): 2'-deoxy
  misc_feature (9)..(9): 2'-deoxy
  misc_feature (10)..(10): 2'-deoxy-2'-fluoro
  misc_feature (11)..(11): 2'-deoxy
  misc_feature (11)..(11): 2'-deoxy
  misc_feature (12)..(14): 2'-deoxy-2'-fluoro
  misc_feature (15)..(18): 2'-deoxy
  misc_feature (15)..(18): 2'-deoxy
  misc_feature (19)..(19): 2'-deoxy-2'-fluoro
  misc_feature (20)..(20): Phosphorothioate 3'-Internucleotide Linkage
  misc_feature (1)..(19): ribonucleotide unmodified or modified as described for this sequence
agucuuccauguccaaggutt

SEQ ID NO: 1636 - DNA, 21 bp, Artificial Sequence
  Description of Artificial Sequence:  Synthetic
  misc_feature (1)..(2): 2'-deoxy
  misc_feature (1)..(2): 2'-deoxy
  misc_feature (3)..(4): 2'-deoxy-2'-fluoro
  misc_feature (5)..(5): 2'-deoxy
  misc_feature (5)..(5): 2'-deoxy
  misc_feature (6)..(6): 2'-deoxy-2'-fluoro
  misc_feature (7)..(8): 2'-deoxy
  misc_feature (7)..(8): 2'-deoxy
  misc_feature (9)..(10): 2'-deoxy-2'-fluoro
  misc_feature (11)..(11): 2'-deoxy
  misc_feature (11)..(11): 2'-deoxy
  misc_feature (12)..(12): 2'-deoxy-2'-fluoro
  misc_feature (13)..(17): 2'-deoxy
  misc_feature (13)..(17): 2'-deoxy
  misc_feature (18)..(19): 2'-deoxy-2'-fluoro
  misc_feature (20)..(20): Phosphorothioate 3'-Internucleotide Linkage
  misc_feature (1)..(19): ribonucleotide unmodified or modified as described for this sequence
ggcuauggucaugaggguutt

SEQ ID NO: 1637 - DNA, 21 bp, Artificial Sequence
  Description of Artificial Sequence:  Synthetic
  misc_feature (1)..(2): 2'-deoxy
  misc_feature (1)..(2): 2'-deoxy
  misc_feature (3)..(7): 2'-deoxy-2'-fluoro
  misc_feature (8)..(8): 2'-deoxy
  misc_feature (8)..(8): 2'-deoxy
  misc_feature (9)..(9): 2'-deoxy-2'-fluoro
  misc_feature (10)..(10): 2'-deoxy
  misc_feature (10)..(10): 2'-deoxy
  misc_feature (11)..(12): 2'-deoxy-2'-fluoro
  misc_feature (13)..(14): 2'-deoxy
  misc_feature (13)..(14): 2'-deoxy
  misc_feature (15)..(15): 2'-deoxy-2'-fluoro
  misc_feature (16)..(16): 2'-deoxy
  misc_feature (16)..(16): 2'-deoxy
  misc_feature (17)..(18): 2'-deoxy-2'-fluoro
  misc_feature (19)..(19): 2'-deoxy
  misc_feature (19)..(19): 2'-deoxy
  misc_feature (20)..(20): Phosphorothioate 3'-Internucleotide Linkage
  misc_feature (1)..(19): ribonucleotide unmodified or modified as described for this sequence
aaucuuugcaccaauguuatt

SEQ ID NO: 1638 - DNA, 21 bp, Artificial Sequence
  Description of Artificial Sequence:  Synthetic
  misc_feature (1)..(2): 2'-deoxy-2'-fluoro
  misc_feature (3)..(3): 2'-deoxy
  misc_feature (3)..(3): 2'-deoxy
  misc_feature (4)..(4): 2'-deoxy-2'-fluoro
  misc_feature (5)..(5): 2'-deoxy
  misc_feature (5)..(5): 2'-deoxy
  misc_feature (6)..(8): 2'-deoxy-2'-fluoro
  misc_feature (9)..(10): 2'-deoxy
  misc_feature (9)..(10): 2'-deoxy
  misc_feature (11)..(11): 2'-deoxy-2'-fluoro
  misc_feature (12)..(14): 2'-deoxy
  misc_feature (12)..(14): 2'-deoxy
  misc_feature (15)..(18): 2'-deoxy-2'-fluoro
  misc_feature (19)..(19): 2'-deoxy
  misc_feature (19)..(19): 2'-deoxy
  misc_feature (20)..(20): Phosphorothioate 3'-Internucleotide Linkage
  misc_feature (1)..(19): ribonucleotide unmodified or modified as described for this sequence
ccacacuuagcaggucccatt

SEQ ID NO: 1639 - DNA, 21 bp, Artificial Sequence
  Description of Artificial Sequence:  Synthetic
  misc_feature (1)..(1): 5'-3 attached terminal deoxyabasic moiety
  misc_feature (1)..(1): 2'-deoxy-2'-fluoro
  misc_feature (2)..(5): 2'-O-methyl
  misc_feature (6)..(14): 2'-deoxy-2'-fluoro
  misc_feature (15)..(16): 2'-O-methyl
  misc_feature (17)..(19): 2'-deoxy-2'-fluoro
  misc_feature (1)..(19): ribonucleotide unmodified or modified as described for this sequence
  misc_feature (21)..(21): 3'-3 attached terminal deoxyabasic moiety
uggagccuuucuuugacuctt

SEQ ID NO: 1640 - DNA, 21 bp, Artificial Sequence
  Description of Artificial Sequence:  Synthetic
  misc_feature (1)..(1): 5'-3 attached terminal deoxyabasic moiety
  misc_feature (1)..(2): 2'-O-methyl
  misc_feature (3)..(11): 2'-deoxy-2'-fluoro
  misc_feature (12)..(13): 2'-O-methyl
  misc_feature (14)..(19): 2'-deoxy-2'-fluoro
  misc_feature (1)..(19): ribonucleotide unmodified or modified as described for this sequence
  misc_feature (21)..(21): 3'-3 attached terminal deoxyabasic moiety
agccuuucuuugacucucutt

SEQ ID NO: 1641 - DNA, 21 bp, Artificial Sequence
  Description of Artificial Sequence:  Synthetic
  misc_feature (1)..(1): 5'-3 attached terminal deoxyabasic moiety
  misc_feature (1)..(3): 2'-O-methyl
  misc_feature (4)..(9): 2'-deoxy-2'-fluoro
  misc_feature (10)..(11): 2'-O-methyl
  misc_feature (12)..(12): 2'-deoxy-2'-fluoro
  misc_feature (13)..(14): 2'-O-methyl
  misc_feature (15)..(19): 2'-deoxy-2'-fluoro
  misc_feature (1)..(19): ribonucleotide unmodified or modified as described for this sequence
  misc_feature (21)..(21): 3'-3 attached terminal deoxyabasic moiety
aaguucccugaugguuucutt

SEQ ID NO: 1642 - DNA, 21 bp, Artificial Sequence
  Description of Artificial Sequence:  Synthetic
  misc_feature (1)..(1): 5'-3 attached terminal deoxyabasic moiety
  misc_feature (1)..(1): 2'-deoxy-2'-fluoro
  misc_feature (2)..(4): 2'-O-methyl
  misc_feature (5)..(5): 2'-deoxy-2'-fluoro
  misc_feature (6)..(9): 2'-O-methyl
  misc_feature (10)..(11): 2'-deoxy-2'-fluoro
  misc_feature (12)..(12): 2'-O-methyl
  misc_feature (13)..(14): 2'-deoxy-2'-fluoro
  misc_feature (15)..(16): 2'-O-methyl
  misc_feature (17)..(18): 2'-deoxy-2'-fluoro
  misc_feature (19)..(19): 2'-O-methyl
  misc_feature (1)..(19): ribonucleotide unmodified or modified as described for this sequence
  misc_feature (21)..(21): 3'-3 attached terminal deoxyabasic moiety
ugggugagguuaccaaccatt

SEQ ID NO: 1643 - DNA, 21 bp, Artificial Sequence
  Description of Artificial Sequence:  Synthetic
  misc_feature (1)..(1): 5'-3 attached terminal deoxyabasic moiety
  misc_feature (1)..(1): 2'-O-methyl
  misc_feature (2)..(5): 2'-deoxy-2'-fluoro
  misc_feature (6)..(8): 2'-O-methyl
  misc_feature (9)..(9): 2'-deoxy-2'-fluoro
  misc_feature (10)..(10): 2'-O-methyl
  misc_feature (11)..(11): 2'-deoxy-2'-fluoro
  misc_feature (12)..(17): 2'-O-methyl
  misc_feature (18)..(19): 2'-deoxy-2'-fluoro
  misc_feature (1)..(19): ribonucleotide unmodified or modified as described for this sequence
  misc_feature (21)..(21): 3'-3 attached terminal deoxyabasic moiety
accuuggacauggaagacutt

SEQ ID NO: 1644 - DNA, 21 bp, Artificial Sequence
  Description of Artificial Sequence:  Synthetic
  misc_feature (1)..(1): 5'-3 attached terminal deoxyabasic moiety
  misc_feature (1)..(2): 2'-O-methyl
  misc_feature (3)..(7): 2'-deoxy-2'-fluoro
  misc_feature (8)..(8): 2'-O-methyl
  misc_feature (9)..(9): 2'-deoxy-2'-fluoro
  misc_feature (10)..(11): 2'-O-methyl
  misc_feature (12)..(13): 2'-deoxy-2'-fluoro
  misc_feature (14)..(14): 2'-O-methyl
  misc_feature (15)..(15): 2'-deoxy-2'-fluoro
  misc_feature (16)..(17): 2'-O-methyl
  misc_feature (18)..(19): 2'-deoxy-2'-fluoro
  misc_feature (1)..(19): ribonucleotide unmodified or modified as described for this sequence
  misc_feature (21)..(21): 3'-3 attached terminal deoxyabasic moiety
aacccucaugaccauagcctt

SEQ ID NO: 1645 - DNA, 21 bp, Artificial Sequence
  Description of Artificial Sequence:  Synthetic
  misc_feature (1)..(1): 5'-3 attached terminal deoxyabasic moiety
  misc_feature (1)..(1): 2'-deoxy-2'-fluoro
  misc_feature (2)..(3): 2'-O-methyl
  misc_feature (4)..(4): 2'-deoxy-2'-fluoro
  misc_feature (5)..(5): 2'-O-methyl
  misc_feature (6)..(7): 2'-deoxy-2'-fluoro
  misc_feature (8)..(9): 2'-O-methyl
  misc_feature (10)..(10): 2'-deoxy-2'-fluoro
  misc_feature (11)..(11): 2'-O-methyl
  misc_feature (12)..(12): 2'-deoxy-2'-fluoro
  misc_feature (13)..(17): 2'-O-methyl
  misc_feature (18)..(19): 2'-deoxy-2'-fluoro
  misc_feature (1)..(19): ribonucleotide unmodified or modified as described for this sequence
  misc_feature (21)..(21): 3'-3 attached terminal deoxyabasic moiety
uaacauuggugcaaagauutt

SEQ ID NO: 1646 - DNA, 21 bp, Artificial Sequence
  Description of Artificial Sequence:  Synthetic
  misc_feature (1)..(1): 5'-3 attached terminal deoxyabasic moiety
  misc_feature (1)..(1): 2'-deoxy-2'-fluoro
  misc_feature (2)..(5): 2'-O-methyl
  misc_feature (6)..(8): 2'-deoxy-2'-fluoro
  misc_feature (9)..(9): 2'-O-methyl
  misc_feature (10)..(11): 2'-deoxy-2'-fluoro
  misc_feature (12)..(14): 2'-O-methyl
  misc_feature (15)..(15): 2'-deoxy-2'-fluoro
  misc_feature (16)..(16): 2'-O-methyl
  misc_feature (17)..(17): 2'-deoxy-2'-fluoro
  misc_feature (18)..(19): 2'-O-methyl
  misc_feature (1)..(19): ribonucleotide unmodified or modified as described for this sequence
  misc_feature (21)..(21): 3'-3 attached terminal deoxyabasic moiety
ugggaccugcuaaguguggtt

SEQ ID NO: 1647 - DNA, 21 bp, Artificial Sequence
  Description of Artificial Sequence:  Synthetic
  misc_feature (1)..(3): 2'-O-methyl
  misc_feature (4)..(5): 2'-deoxy-2'-fluoro
  misc_feature (6)..(14): 2'-O-methyl
  misc_feature (15)..(18): 2'-deoxy-2'-fluoro
  misc_feature (19)..(19): 2'-O-methyl
  misc_feature (20)..(20): Phosphorothioate 3'-Internucleotide Linkage
  misc_feature (1)..(19): ribonucleotide unmodified or modified as described for this sequence
gagucaaagaaaggcuccatt

SEQ ID NO: 1648 - DNA, 21 bp, Artificial Sequence
  Description of Artificial Sequence:  Synthetic
  misc_feature (1)..(6): 2'-O-methyl
  misc_feature (7)..(8): 2'-deoxy-2'-fluoro
  misc_feature (9)..(17): 2'-O-methyl
  misc_feature (18)..(19): 2'-deoxy-2'-fluoro
  misc_feature (20)..(20): Phosphorothioate 3'-Internucleotide Linkage
  misc_feature (1)..(19): ribonucleotide unmodified or modified as described for this sequence
agagagucaaagaaaggcutt

SEQ ID NO: 1649 - DNA, 21 bp, Artificial Sequence
  Description of Artificial Sequence:  Synthetic
  misc_feature (1)..(5): 2'-O-methyl
  misc_feature (6)..(7): 2'-deoxy-2'-fluoro
  misc_feature (8)..(8): 2'-O-methyl
  misc_feature (9)..(10): 2'-deoxy-2'-fluoro
  misc_feature (11)..(16): 2'-O-methyl
  misc_feature (17)..(19): 2'-deoxy-2'-fluoro
  misc_feature (20)..(20): Phosphorothioate 3'-Internucleotide Linkage
  misc_feature (1)..(19): ribonucleotide unmodified or modified as described for this sequence
agaaaccaucagggaacuutt

SEQ ID NO: 1650 - DNA, 21 bp, Artificial Sequence
  Description of Artificial Sequence:  Synthetic
  misc_feature (1)..(1): 2'-deoxy-2'-fluoro
  misc_feature (2)..(3): 2'-O-methyl
  misc_feature (4)..(5): 2'-deoxy-2'-fluoro
  misc_feature (6)..(7): 2'-O-methyl
  misc_feature (8)..(8): 2'-deoxy-2'-fluoro
  misc_feature (9)..(10): 2'-O-methyl
  misc_feature (11)..(14): 2'-deoxy-2'-fluoro
  misc_feature (15)..(15): 2'-O-methyl
  misc_feature (16)..(18): 2'-deoxy-2'-fluoro
  misc_feature (19)..(19): 2'-O-methyl
  misc_feature (20)..(20): Phosphorothioate 3'-Internucleotide Linkage
  misc_feature (1)..(19): ribonucleotide unmodified or modified as described for this sequence
ugguugguaaccucacccatt

SEQ ID NO: 1651 - DNA, 21 bp, Artificial Sequence
  Description of Artificial Sequence:  Synthetic
  misc_feature (1)..(2): 2'-O-methyl
  misc_feature (3)..(8): 2'-deoxy-2'-fluoro
  misc_feature (9)..(9): 2'-O-methyl
  misc_feature (10)..(10): 2'-deoxy-2'-fluoro
  misc_feature (11)..(11): 2'-O-methyl
  misc_feature (12)..(14): 2'-deoxy-2'-fluoro
  misc_feature (15)..(18): 2'-O-methyl
  misc_feature (19)..(19): 2'-deoxy-2'-fluoro
  misc_feature (20)..(20): Phosphorothioate 3'-Internucleotide Linkage
  misc_feature (1)..(19): ribonucleotide unmodified or modified as described for this sequence
agucuuccauguccaaggutt

SEQ ID NO: 1652 - DNA, 21 bp, Artificial Sequence
  Description of Artificial Sequence:  Synthetic
  misc_feature (1)..(2): 2'-O-methyl
  misc_feature (3)..(4): 2'-deoxy-2'-fluoro
  misc_feature (5)..(5): 2'-O-methyl
  misc_feature (6)..(6): 2'-deoxy-2'-fluoro
  misc_feature (7)..(8): 2'-O-methyl
  misc_feature (9)..(10): 2'-deoxy-2'-fluoro
  misc_feature (11)..(11): 2'-O-methyl
  misc_feature (12)..(12): 2'-deoxy-2'-fluoro
  misc_feature (13)..(17): 2'-O-methyl
  misc_feature (18)..(19): 2'-deoxy-2'-fluoro
  misc_feature (20)..(20): Phosphorothioate 3'-Internucleotide Linkage
  misc_feature (1)..(19): ribonucleotide unmodified or modified as described for this sequence
ggcuauggucaugaggguutt

SEQ ID NO: 1653 - DNA, 21 bp, Artificial Sequence
  Description of Artificial Sequence:  Synthetic
  misc_feature (1)..(2): 2'-O-methyl
  misc_feature (3)..(7): 2'-deoxy-2'-fluoro
  misc_feature (8)..(8): 2'-O-methyl
  misc_feature (9)..(9): 2'-deoxy-2'-fluoro
  misc_feature (10)..(10): 2'-O-methyl
  misc_feature (11)..(12): 2'-deoxy-2'-fluoro
  misc_feature (13)..(14): 2'-O-methyl
  misc_feature (15)..(15): 2'-deoxy-2'-fluoro
  misc_feature (16)..(16): 2'-O-methyl
  misc_feature (17)..(18): 2'-deoxy-2'-fluoro
  misc_feature (19)..(19): 2'-O-methyl
  misc_feature (20)..(20): Phosphorothioate 3'-Internucleotide Linkage
  misc_feature (1)..(19): ribonucleotide unmodified or modified as described for this sequence
aaucuuugcaccaauguuatt

SEQ ID NO: 1654 - DNA, 21 bp, Artificial Sequence
  Description of Artificial Sequence:  Synthetic
  misc_feature (1)..(2): 2'-deoxy-2'-fluoro
  misc_feature (3)..(3): 2'-O-methyl
  misc_feature (4)..(4): 2'-deoxy-2'-fluoro
  misc_feature (5)..(5): 2'-O-methyl
  misc_feature (6)..(8): 2'-deoxy-2'-fluoro
  misc_feature (9)..(10): 2'-O-methyl
  misc_feature (11)..(11): 2'-deoxy-2'-fluoro
  misc_feature (12)..(14): 2'-O-methyl
  misc_feature (15)..(18): 2'-deoxy-2'-fluoro
  misc_feature (19)..(19): 2'-O-methyl
  misc_feature (20)..(20): Phosphorothioate 3'-Internucleotide Linkage
  misc_feature (1)..(19): ribonucleotide unmodified or modified as described for this sequence
ccacacuuagcaggucccatt

SEQ ID NO: 1655 - DNA, 21 bp, Artificial Sequence
  Description of Artificial Sequence:  Synthetic
  misc_feature (1)..(1): 5'-3 attached terminal deoxyabasic moiety
  misc_feature (1)..(19): ribonucleotide unmodified or modified as described for this sequence
  misc_feature (21)..(21): 3'-3 attached terminal deoxyabasic moiety
uggagccuuucuuugacuctt

SEQ ID NO: 1656 - DNA, 21 bp, Artificial Sequence
  Description of Artificial Sequence:  Synthetic
  misc_feature (1)..(1): 5'-3 attached terminal deoxyabasic moiety
  misc_feature (1)..(19): ribonucleotide unmodified or modified as described for this sequence
  misc_feature (21)..(21): 3'-3 attached terminal deoxyabasic moiety
agccuuucuuugacucucutt

SEQ ID NO: 1657 - DNA, 21 bp, Artificial Sequence
  Description of Artificial Sequence:  Synthetic
  misc_feature (1)..(1): 5'-3 attached terminal deoxyabasic moiety
  misc_feature (1)..(19): ribonucleotide unmodified or modified as described for this sequence
  misc_feature (21)..(21): 3'-3 attached terminal deoxyabasic moiety
aaguucccugaugguuucutt

SEQ ID NO: 1658 - DNA, 21 bp, Artificial Sequence
  Description of Artificial Sequence:  Synthetic
  misc_feature (1)..(1): 5'-3 attached terminal deoxyabasic moiety
  misc_feature (1)..(19): ribonucleotide unmodified or modified as described for this sequence
  misc_feature (21)..(21): 3'-3 attached terminal deoxyabasic moiety
ugggugagguuaccaaccatt

SEQ ID NO: 1659 - DNA, 21 bp, Artificial Sequence
  Description of Artificial Sequence:  Synthetic
  misc_feature (1)..(1): 5'-3 attached terminal deoxyabasic moiety
  misc_feature (1)..(19): ribonucleotide unmodified or modified as described for this sequence
  misc_feature (21)..(21): 3'-3 attached terminal deoxyabasic moiety
accuuggacauggaagacutt

SEQ ID NO: 1660 - DNA, 21 bp, Artificial Sequence
  Description of Artificial Sequence:  Synthetic
  misc_feature (1)..(1): 5'-3 attached terminal deoxyabasic moiety
  misc_feature (1)..(19): ribonucleotide unmodified or modified as described for this sequence
  misc_feature (21)..(21): 3'-3 attached terminal deoxyabasic moiety
aacccucaugaccauagcctt

SEQ ID NO: 1661 - DNA, 21 bp, Artificial Sequence
  Description of Artificial Sequence:  Synthetic
  misc_feature (1)..(1): 5'-3 attached terminal deoxyabasic moiety
  misc_feature (1)..(19): ribonucleotide unmodified or modified as described for this sequence
  misc_feature (21)..(21): 3'-3 attached terminal deoxyabasic moiety
uaacauuggugcaaagauutt

SEQ ID NO: 1662 - DNA, 21 bp, Artificial Sequence
  Description of Artificial Sequence:  Synthetic
  misc_feature (1)..(1): 5'-3 attached terminal deoxyabasic moiety
  misc_feature (1)..(19): ribonucleotide unmodified or modified as described for this sequence
  misc_feature (21)..(21): 3'-3 attached terminal deoxyabasic moiety
ugggaccugcuaaguguggtt

SEQ ID NO: 1663 - DNA, 21 bp, Artificial Sequence
  Description of Artificial Sequence:  Synthetic
  misc_feature (20)..(20): Phosphorothioate 3'-Internucleotide Linkage
  misc_feature (1)..(19): ribonucleotide unmodified or modified as described for this sequence
gagucaaagaaaggcuccatt

SEQ ID NO: 1664 - DNA, 21 bp, Artificial Sequence
  Description of Artificial Sequence:  Synthetic
  misc_feature (20)..(20): Phosphorothioate 3'-Internucleotide Linkage
  misc_feature (1)..(19): ribonucleotide unmodified or modified as described for this sequence
agagagucaaagaaaggcutt

SEQ ID NO: 1665 - DNA, 21 bp, Artificial Sequence
  Description of Artificial Sequence:  Synthetic
  misc_feature (20)..(20): Phosphorothioate 3'-Internucleotide Linkage
  misc_feature (1)..(19): ribonucleotide unmodified or modified as described for this sequence
agaaaccaucagggaacuutt

SEQ ID NO: 1666 - DNA, 21 bp, Artificial Sequence
  Description of Artificial Sequence:  Synthetic
  misc_feature (20)..(20): Phosphorothioate 3'-Internucleotide Linkage
  misc_feature (1)..(19): ribonucleotide unmodified or modified as described for this sequence
ugguugguaaccucacccatt

SEQ ID NO: 1667 - DNA, 21 bp, Artificial Sequence
  Description of Artificial Sequence:  Synthetic
  misc_feature (20)..(20): Phosphorothioate 3'-Internucleotide Linkage
  misc_feature (1)..(19): ribonucleotide unmodified or modified as described for this sequence
agucuuccauguccaaggutt

SEQ ID NO: 1668 - DNA, 21 bp, Artificial Sequence
  Description of Artificial Sequence:  Synthetic
  misc_feature (20)..(20): Phosphorothioate 3'-Internucleotide Linkage
  misc_feature (1)..(19): ribonucleotide unmodified or modified as described for this sequence
ggcuauggucaugaggguutt

SEQ ID NO: 1669 - DNA, 21 bp, Artificial Sequence
  Description of Artificial Sequence:  Synthetic
  misc_feature (20)..(20): Phosphorothioate 3'-Internucleotide Linkage
  misc_feature (1)..(19): ribonucleotide unmodified or modified as described for this sequence
aaucuuugcaccaauguuatt

SEQ ID NO: 1670 - DNA, 21 bp, Artificial Sequence
  Description of Artificial Sequence:  Synthetic
  misc_feature (20)..(20): Phosphorothioate 3'-Internucleotide Linkage
  misc_feature (1)..(19): ribonucleotide unmodified or modified as described for this sequence
ccacacuuagcaggucccatt

SEQ ID NO: 1671 - DNA, 21 bp, Artificial Sequence
  Description of Artificial Sequence:  Synthetic
  misc_feature (1)..(3): 2'-O-methyl
  misc_feature (4)..(5): 2'-deoxy-2'-fluoro
  misc_feature (6)..(14): 2'-O-methyl
  misc_feature (15)..(18)
  misc_feature (19)..(19): 2'-O-methyl
  misc_feature (1)..(19): ribonucleotide unmodified or modified as described for this sequence
  misc_feature (21)..(21): 3'-3 attached terminal deoxyabasic moiety
gagucaaagaaaggcuccatt

SEQ ID NO: 1672 - DNA, 21 bp, Artificial Sequence
  Description of Artificial Sequence:  Synthetic
  misc_feature (1)..(6): 2'-O-methyl
  misc_feature (7)..(8): 2'-deoxy-2'-fluoro
  misc_feature (9)..(17): 2'-O-methyl
  misc_feature (18)..(19): 2'-deoxy-2'-fluoro
  misc_feature (1)..(19): ribonucleotide unmodified or modified as described for this sequence
  misc_feature (21)..(21): 3'-3 attached terminal deoxyabasic moiety
agagagucaaagaaaggcutt

SEQ ID NO: 1673 - DNA, 21 bp, Artificial Sequence
  Description of Artificial Sequence:  Synthetic
  misc_feature (1)..(5): 2'-O-methyl
  misc_feature (6)..(7): 2'-deoxy-2'-fluoro
  misc_feature (8)..(8): 2'-O-methyl
  misc_feature (9)..(10): 2'-deoxy-2'-fluoro
  misc_feature (11)..(16): 2'-O-methyl
  misc_feature (17)..(19): 2'-deoxy-2'-fluoro
  misc_feature (1)..(19): ribonucleotide unmodified or modified as described for this sequence
  misc_feature (21)..(21): 3'-3 attached terminal deoxyabasic moiety
agaaaccaucagggaacuutt

SEQ ID NO: 1674 - DNA, 21 bp, Artificial Sequence
  Description of Artificial Sequence:  Synthetic
  misc_feature (1)..(1): 2'-deoxy-2'-fluoro
  misc_feature (2)..(3): 2'-O-methyl
  misc_feature (4)..(5): 2'-deoxy-2'-fluoro
  misc_feature (6)..(10): 2'-O-methyl
  misc_feature (8)..(8): 2'-deoxy-2'-fluoro
  misc_feature (11)..(14): 2'-deoxy-2'-fluoro
  misc_feature (15)..(15): 2'-O-methyl
  misc_feature (16)..(18): 2'-deoxy-2'-fluoro
  misc_feature (19)..(19): 2'-O-methyl
  misc_feature (1)..(19): ribonucleotide unmodified or modified as described for this sequence
  misc_feature (21)..(21): 3'-3 attached terminal deoxyabasic moiety
ugguugguaaccucacccatt

SEQ ID NO: 1675 - DNA, 21 bp, Artificial Sequence
  Description of Artificial Sequence:  Synthetic
  misc_feature (1)..(2): 2'-O-methyl
  misc_feature (3)..(8): 2'-deoxy-2'-fluoro
  misc_feature (9)..(9): 2'-O-methyl
  misc_feature (10)..(10): 2'-deoxy-2'-fluoro
  misc_feature (11)..(11): 2'-O-methyl
  misc_feature (12)..(14): 2'-deoxy-2'-fluoro
  misc_feature (15)..(18): 2'-O-methyl
  misc_feature (19)..(19): 2'-deoxy-2'-fluoro
  misc_feature (1)..(19): ribonucleotide unmodified or modified as described for this sequence
  misc_feature (21)..(21): 3'-3 attached terminal deoxyabasic moiety
agucuuccauguccaaggutt

SEQ ID NO: 1676 - DNA, 21 bp, Artificial Sequence
  Description of Artificial Sequence:  Synthetic
  misc_feature (1)..(2): 2'-O-methyl
  misc_feature (3)..(4): 2'-deoxy-2'-fluoro
  misc_feature (5)..(5): 2'-O-methyl
  misc_feature (6)..(6): 2'-deoxy-2'-fluoro
  misc_feature (7)..(8): 2'-O-methyl
  misc_feature (9)..(10): 2'-deoxy-2'-fluoro
  misc_feature (11)..(11): 2'-O-methyl
  misc_feature (12)..(12): 2'-deoxy-2'-fluoro
  misc_feature (13)..(17): 2'-O-methyl
  misc_feature (18)..(19): 2'-deoxy-2'-fluoro
  misc_feature (1)..(19): ribonucleotide unmodified or modified as described for this sequence
  misc_feature (21)..(21): 3'-3 attached terminal deoxyabasic moiety
ggcuauggucaugaggguutt

SEQ ID NO: 1677 - DNA, 21 bp, Artificial Sequence
  Description of Artificial Sequence:  Synthetic
  misc_feature (1)..(2): 2'-O-methyl
  misc_feature (3)..(7): 2'-deoxy-2'-fluoro
  misc_feature (8)..(8): 2'-O-methyl
  misc_feature (9)..(9): 2'-deoxy-2'-fluoro
  misc_feature (10)..(10): 2'-O-methyl
  misc_feature (11)..(12): 2'-deoxy-2'-fluoro
  misc_feature (13)..(14): 2'-O-methyl
  misc_feature (15)..(15): 2'-deoxy-2'-fluoro
  misc_feature (16)..(16): 2'-O-methyl
  misc_feature (17)..(18): 2'-deoxy-2'-fluoro
  misc_feature (19)..(19): 2'-O-methyl
  misc_feature (1)..(19): ribonucleotide unmodified or modified as described for this sequence
  misc_feature (21)..(21): 3'-3 attached terminal deoxyabasic moiety
aaucuuugcaccaauguuatt

SEQ ID NO: 1678 - DNA, 21 bp, Artificial Sequence
  Description of Artificial Sequence:  Synthetic
  misc_feature (1)..(2): 2'-deoxy-2'-fluoro
  misc_feature (3)..(3): 2'-O-methyl
  misc_feature (4)..(4): 2'-deoxy-2'-fluoro
  misc_feature (5)..(5): 2'-O-methyl
  misc_feature (6)..(8): 2'-deoxy-2'-fluoro
  misc_feature (9)..(10): 2'-O-methyl
  misc_feature (11)..(11): 2'-deoxy-2'-fluoro
  misc_feature (12)..(14): 2'-O-methyl
  misc_feature (15)..(18): 2'-deoxy-2'-fluoro
  misc_feature (19)..(19): 2'-O-methyl
  misc_feature (1)..(19): ribonucleotide unmodified or modified as described for this sequence
  misc_feature (21)..(21): 3'-3 attached terminal deoxyabasic moiety
ccacacuuagcaggucccatt

SEQ ID NO: 1679 - DNA, 21 bp, Artificial Sequence
  Description of Artificial Sequence:  Synthetic
  misc_feature (1)..(19): ribonucleotide unmodified or modified as described for this sequence
  misc_feature (21)..(21): 3'-3 attached terminal deoxyabasic moiety
gagucaaagaaaggcuccatt

SEQ ID NO: 1680 - DNA, 21 bp, Artificial Sequence
  Description of Artificial Sequence:  Synthetic
  misc_feature (1)..(19): ribonucleotide unmodified or modified as described for this sequence
  misc_feature (21)..(21): 3'-3 attached terminal deoxyabasic moiety
agagagucaaagaaaggcutt

SEQ ID NO: 1681 - DNA, 21 bp, Artificial Sequence
  Description of Artificial Sequence:  Synthetic
  misc_feature (1)..(19): ribonucleotide unmodified or modified as described for this sequence
  misc_feature (21)..(21): 3'-3 attached terminal deoxyabasic moiety
agaaaccaucagggaacuutt

SEQ ID NO: 1682 - DNA, 21 bp, Artificial Sequence
  Description of Artificial Sequence:  Synthetic
  misc_feature (1)..(19): ribonucleotide unmodified or modified as described for this sequence
  misc_feature (21)..(21): 3'-3 attached terminal deoxyabasic moiety
ugguugguaaccucacccatt

SEQ ID NO: 1683 - DNA, 21 bp, Artificial Sequence
  Description of Artificial Sequence:  Synthetic
  misc_feature (1)..(19): ribonucleotide unmodified or modified as described for this sequence
  misc_feature (21)..(21): 3'-3 attached terminal deoxyabasic moiety
agucuuccauguccaaggutt

SEQ ID NO: 1684 - DNA, 21 bp, Artificial Sequence
  Description of Artificial Sequence:  Synthetic
  misc_feature (1)..(19): ribonucleotide unmodified or modified as described for this sequence
  misc_feature (21)..(21): 3'-3 attached terminal deoxyabasic moiety
ggcuauggucaugaggguutt

SEQ ID NO: 1685 - DNA, 21 bp, Artificial Sequence
  Description of Artificial Sequence:  Synthetic
  misc_feature (1)..(19): ribonucleotide unmodified or modified as described for this sequence
  misc_feature (21)..(21): 3'-3 attached terminal deoxyabasic moiety
aaucuuugcaccaauguuatt

SEQ ID NO: 1686 - DNA, 21 bp, Artificial Sequence
  Description of Artificial Sequence:  Synthetic
  misc_feature (1)..(19): ribonucleotide unmodified or modified as described for this sequence
  misc_feature (21)..(21): 3'-3 attached terminal deoxyabasic moiety
ccacacuuagcaggucccatt

SEQ ID NO: 1687 - DNA, 21 bp, Artificial Sequence
  Description of Artificial Sequence:  Synthetic
  misc_feature (1)..(2): 2'-deoxy-2'-fluoro
  misc_feature (8)..(8): 2'-deoxy-2'-fluoro
  misc_feature (10)..(10): 2'-deoxy-2'-fluoro
  misc_feature (13)..(14): 2'-deoxy-2'-fluoro
  misc_feature (16)..(16): 2'-deoxy-2'-fluoro
  misc_feature (19)..(19): 2'-deoxy-2'-fluoro
  misc_feature (1)..(19): ribonucleotide unmodified or modified as described for this sequence
  misc_feature (21)..(21): 3'-3 attached terminal deoxyabasic moiety
uuagaaacgugguuacaautt

SEQ ID NO: 1688 - DNA, 21 bp, Artificial Sequence
  Description of Artificial Sequence:  Synthetic
  misc_feature (2)..(3): 2'-deoxy-2'-fluoro
  misc_feature (5)..(5): 2'-deoxy-2'-fluoro
  misc_feature (8)..(9): 2'-deoxy-2'-fluoro
  misc_feature (11)..(11): 2'-deoxy-2'-fluoro
  misc_feature (13)..(17): 2'-deoxy-2'-fluoro
  misc_feature (20)..(20): Phosphorothioate 3'-Internucleotide Linkage
  misc_feature (1)..(19): ribonucleotide unmodified or modified as described for this sequence
auuguaaccacguuucuaatt

SEQ ID NO: 1689 - DNA, 21 bp, Artificial Sequence
  Description of Artificial Sequence:  Synthetic
  misc_feature (1)..(1): 5'-3 attached terminal deoxyabasic moiety
  misc_feature (1)..(2): 2'-deoxy-2'-fluoro
  misc_feature (3)..(7): 2'-deoxy
  misc_feature (8)..(8): 2'-deoxy-2'-fluoro
  misc_feature (9)..(9): 2'-deoxy
  misc_feature (10)..(10): 2'-deoxy-2'-fluoro
  misc_feature (11)..(12): 2'-deoxy
  misc_feature (13)..(14): 2'-deoxy-2'-fluoro
  misc_feature (15)..(15): 2'-deoxy
  misc_feature (16)..(16): 2'-deoxy-2'-fluoro
  misc_feature (17)..(18): 2'-deoxy
  misc_feature (19)..(19): 2'-deoxy-2'-fluoro
  misc_feature (1)..(19): ribonucleotide unmodified or modified as described for this sequence
  misc_feature (21)..(21): 3'-3 attached terminal deoxyabasic moiety
uuagaaacgugguuacaautt

SEQ ID NO: 1690 - DNA, 21 bp, Artificial Sequence
  Description of Artificial Sequence:  Synthetic
  misc_feature (1)..(1): 2'-deoxy
  misc_feature (2)..(3): 2'-deoxy-2'-fluoro
  misc_feature (4)..(4): 2'-deoxy
  misc_feature (5)..(5): 2'-deoxy-2'-fluoro
  misc_feature (6)..(7): 2'-deoxy
  misc_feature (8)..(9): 2'-deoxy-2'-fluoro
  misc_feature (10)..(10): 2'-deoxy
  misc_feature (11)..(11): 2'-deoxy-2'-fluoro
  misc_feature (12)..(12): 2'-deoxy
  misc_feature (13)..(17): 2'-deoxy-2'-fluoro
  misc_feature (18)..(19): 2'-deoxy
  misc_feature (20)..(20): Phosphorothioate 3'-Internucleotide Linkage
  misc_feature (1)..(19): ribonucleotide unmodified or modified as described for this sequence
auuguaaccacguuucuaatt

SEQ ID NO: 1691 - DNA, 21 bp, Artificial Sequence
  Description of Artificial Sequence:  Synthetic
  misc_feature (1)..(19): ribonucleotide unmodified or modified as described for this sequence
aauggacgaccccaggguatt

SEQ ID NO: 1692 - DNA, 21 bp, Artificial Sequence
  Description of Artificial Sequence:  Synthetic
  misc_feature (1)..(19): ribonucleotide unmodified or modified as described for this sequence
guugcacuccugaucuggatt

SEQ ID NO: 1693 - DNA, 21 bp, Artificial Sequence
  Description of Artificial Sequence:  Synthetic
  misc_feature (1)..(19): ribonucleotide unmodified or modified as described for this sequence
aagcacagaaagggagucatt

SEQ ID NO: 1694 - DNA, 21 bp, Artificial Sequence
  Description of Artificial Sequence:  Synthetic
  misc_feature (1)..(19): ribonucleotide unmodified or modified as described for this sequence
ggagucacaagacacuguutt

SEQ ID NO: 1695 - DNA, 21 bp, Artificial Sequence
  Description of Artificial Sequence:  Synthetic
  misc_feature (1)..(19): ribonucleotide unmodified or modified as described for this sequence
cuggaacacaaccauagcctt

SEQ ID NO: 1696 - DNA, 21 bp, Artificial Sequence
  Description of Artificial Sequence:  Synthetic
  misc_feature (1)..(19): ribonucleotide unmodified or modified as described for this sequence
gaacacaaccauagccugutt

SEQ ID NO: 1697 - DNA, 21 bp, Artificial Sequence
  Description of Artificial Sequence:  Synthetic
  misc_feature (1)..(19): ribonucleotide unmodified or modified as described for this sequence
accagauuugagggacgagtt

SEQ ID NO: 1698 - DNA, 21 bp, Artificial Sequence
  Description of Artificial Sequence:  Synthetic
  misc_feature (1)..(19): ribonucleotide unmodified or modified as described for this sequence
uaugcccaaagcgguagaatt

SEQ ID NO: 1699 - DNA, 21 bp, Artificial Sequence
  Description of Artificial Sequence:  Synthetic
  misc_feature (1)..(19): ribonucleotide unmodified or modified as described for this sequence
uacccuggggucguccauutt

SEQ ID NO: 1700 - DNA, 21 bp, Artificial Sequence
  Description of Artificial Sequence:  Synthetic
  misc_feature (1)..(19): ribonucleotide unmodified or modified as described for this sequence
uccagaucaggagugcaactt

SEQ ID NO: 1701 - DNA, 21 bp, Artificial Sequence
  Description of Artificial Sequence:  Synthetic
  misc_feature (1)..(19): ribonucleotide unmodified or modified as described for this sequence
ugacucccuuucugugcuutt

SEQ ID NO: 1702 - DNA, 21 bp, Artificial Sequence
  Description of Artificial Sequence:  Synthetic
  misc_feature (1)..(19): ribonucleotide unmodified or modified as described for this sequence
aacagugucuugugacucctt

SEQ ID NO: 1703 - DNA, 21 bp, Artificial Sequence
  Description of Artificial Sequence:  Synthetic
  misc_feature (1)..(19): ribonucleotide unmodified or modified as described for this sequence
ggcuaugguuguguuccagtt

SEQ ID NO: 1704 - DNA, 21 bp, Artificial Sequence
  Description of Artificial Sequence:  Synthetic
  misc_feature (1)..(19): ribonucleotide unmodified or modified as described for this sequence
acaggcuaugguuguguuctt

SEQ ID NO: 1705 - DNA, 21 bp, Artificial Sequence
  Description of Artificial Sequence:  Synthetic
  misc_feature (1)..(19): ribonucleotide unmodified or modified as described for this sequence
cucgucccucaaaucuggutt

SEQ ID NO: 1706 - DNA, 21 bp, Artificial Sequence
  Description of Artificial Sequence:  Synthetic
  misc_feature (1)..(19): ribonucleotide unmodified or modified as described for this sequence
uucuaccgcuuugggcauatt

SEQ ID NO: 1707 - DNA, 21 bp, Artificial Sequence
  Description of Artificial Sequence:  Synthetic
  misc_feature (1)..(1): 5'-3 attached terminal deoxyabasic moiety
  misc_feature (3)..(3): 2'-deoxy-2'-fluoro
  misc_feature (7)..(7): 2'-deoxy-2'-fluoro
  misc_feature (10)..(13): 2'-deoxy-2'-fluoro
  misc_feature (18)..(18): 2'-deoxy-2'-fluoro
  misc_feature (1)..(19): ribonucleotide unmodified or modified as described for this sequence
  misc_feature (21)..(21): 3'-3 attached terminal deoxyabasic moiety
aauggacgaccccaggguatt

SEQ ID NO: 1708 - DNA, 21 bp, Artificial Sequence
  Description of Artificial Sequence:  Synthetic
  misc_feature (1)..(1): 5'-3 attached terminal deoxyabasic moiety
  misc_feature (2)..(3): 2'-deoxy-2'-fluoro
  misc_feature (5)..(5): 2'-deoxy-2'-fluoro
  misc_feature (7)..(11): 2'-deoxy-2'-fluoro
  misc_feature (14)..(16): 2'-deoxy-2'-fluoro
  misc_feature (1)..(19): ribonucleotide unmodified or modified as described for this sequence
  misc_feature (21)..(21): 3'-3 attached terminal deoxyabasic moiety
guugcacuccugaucuggatt

SEQ ID NO: 1709 - DNA, 21 bp, Artificial Sequence
  Description of Artificial Sequence:  Synthetic
  misc_feature (1)..(1): 5'-3 attached terminal deoxyabasic moiety
  misc_feature (4)..(4): 2'-deoxy-2'-fluoro
  misc_feature (6)..(6): 2'-deoxy-2'-fluoro
  misc_feature (17)..(18): 2'-deoxy-2'-fluoro
  misc_feature (1)..(19): ribonucleotide unmodified or modified as described for this sequence
  misc_feature (21)..(21): 3'-3 attached terminal deoxyabasic moiety
aagcacagaaagggagucatt

SEQ ID NO: 1710 - DNA, 21 bp, Artificial Sequence
  Description of Artificial Sequence:  Synthetic
  misc_feature (1)..(1): 5'-3 attached terminal deoxyabasic moiety
  misc_feature (5)..(6): 2'-deoxy-2'-fluoro
  misc_feature (8)..(8): 2'-deoxy-2'-fluoro
  misc_feature (13)..(13): 2'-deoxy-2'-fluoro
  misc_feature (15)..(16): 2'-deoxy-2'-fluoro
  misc_feature (18)..(19): 2'-deoxy-2'-fluoro
  misc_feature (1)..(19): ribonucleotide unmodified or modified as described for this sequence
  misc_feature (21)..(21): 3'-3 attached terminal deoxyabasic moiety
ggagucacaagacacuguutt

SEQ ID NO: 1711 - DNA, 21 bp, Artificial Sequence
  Description of Artificial Sequence:  Synthetic
  misc_feature (1)..(1): 5'-3 attached terminal deoxyabasic moiety
  misc_feature (1)..(2): 2'-deoxy-2'-fluoro
  misc_feature (7)..(7): 2'-deoxy-2'-fluoro
  misc_feature (9)..(9): 2'-deoxy-2'-fluoro
  misc_feature (12)..(13): 2'-deoxy-2'-fluoro
  misc_feature (15)..(15): 2'-deoxy-2'-fluoro
  misc_feature (18)..(19): 2'-deoxy-2'-fluoro
  misc_feature (1)..(19): ribonucleotide unmodified or modified as described for this sequence
  misc_feature (21)..(21): 3'-3 attached terminal deoxyabasic moiety
cuggaacacaaccauagcctt

SEQ ID NO: 1712 - DNA, 21 bp, Artificial Sequence
  Description of Artificial Sequence:  Synthetic
  misc_feature (1)..(1): 5'-3 attached terminal deoxyabasic moiety
  misc_feature (4)..(4): 2'-deoxy-2'-fluoro
  misc_feature (6)..(6): 2'-deoxy-2'-fluoro
  misc_feature (9)..(10): 2'-deoxy-2'-fluoro
  misc_feature (12)..(12): 2'-deoxy-2'-fluoro
  misc_feature (15)..(17): 2'-deoxy-2'-fluoro
  misc_feature (19)..(19): 2'-deoxy-2'-fluoro
  misc_feature (1)..(19): ribonucleotide unmodified or modified as described for this sequence
  misc_feature (21)..(21): 3'-3 attached terminal deoxyabasic moiety
gaacacaaccauagccugutt

SEQ ID NO: 1713 - DNA, 21 bp, Artificial Sequence
  Description of Artificial Sequence:  Synthetic
  misc_feature: 2'-deoxy-2'-fluoro
  misc_feature (1)..(1): 5'-3 attached terminal deoxyabasic moiety
  misc_feature (2)..(3): 2'-deoxy-2'-fluoro
  misc_feature (7)..(9): 2'-deoxy-2'-fluoro
  misc_feature (16)..(16): 2'-deoxy-2'-fluoro
  misc_feature (1)..(19): ribonucleotide unmodified or modified as described for this sequence
  misc_feature (21)..(21): 3'-3 attached terminal deoxyabasic moiety
accagauuugagggacgagtt

SEQ ID NO: 1714 - DNA, 21 bp, Artificial Sequence
  Description of Artificial Sequence:  Synthetic
  misc_feature: 2'-deoxy-2'-fluoro
  misc_feature (1)..(1): 5'-3 attached terminal deoxyabasic moiety
  misc_feature (1)..(1): 2'-deoxy-2'-fluoro
  misc_feature (3)..(3): 2'-deoxy-2'-fluoro
  misc_feature (5)..(7): 2'-deoxy-2'-fluoro
  misc_feature (12)..(12): 2'-deoxy-2'-fluoro
  misc_feature (15)..(15): 2'-deoxy-2'-fluoro
  misc_feature (1)..(19): ribonucleotide unmodified or modified as described for this sequence
  misc_feature (21)..(21): 3'-3 attached terminal deoxyabasic moiety
uaugcccaaagcgguagaatt

SEQ ID NO: 1715 - DNA, 21 bp, Artificial Sequence
  Description of Artificial Sequence:  Synthetic
  misc_feature (1)..(1): 2'-deoxy-2'-fluoro
  misc_feature (3)..(6): 2'-deoxy-2'-fluoro
  misc_feature (11)..(12): 2'-deoxy-2'-fluoro
  misc_feature (14)..(16): 2'-deoxy-2'-fluoro
  misc_feature (18)..(19): 2'-deoxy-2'-fluoro
  misc_feature (20)..(20): Phosphorothioate 3'-Internucleotide Linkage
  misc_feature (1)..(19): ribonucleotide unmodified or modified as described for this sequence
uacccuggggucguccauutt

SEQ ID NO: 1716 - DNA, 21 bp, Artificial Sequence
  Description of Artificial Sequence:  Synthetic
  misc_feature (1)..(3): 2'-deoxy-2'-fluoro
  misc_feature (7)..(8): 2'-deoxy-2'-fluoro
  misc_feature (14)..(14): 2'-deoxy-2'-fluoro
  misc_feature (16)..(16): 2'-deoxy-2'-fluoro
  misc_feature (19)..(19): 2'-deoxy-2'-fluoro
  misc_feature (20)..(20): Phosphorothioate 3'-Internucleotide Linkage
  misc_feature (1)..(19): ribonucleotide unmodified or modified as described for this sequence
uccagaucaggagugcaactt

SEQ ID NO: 1717 - DNA, 21 bp, Artificial Sequence
  Description of Artificial Sequence:  Synthetic
  misc_feature (1)..(1): 2'-deoxy-2'-fluoro
  misc_feature (4)..(13): 2'-deoxy-2'-fluoro
  misc_feature (15)..(15): 2'-deoxy-2'-fluoro
  misc_feature (17)..(19): 2'-deoxy-2'-fluoro
  misc_feature (20)..(20): Phosphorothioate 3'-Internucleotide Linkage
  misc_feature (1)..(19): ribonucleotide unmodified or modified as described for this sequence
ugacucccuuucugugcuutt

SEQ ID NO: 1718 - DNA, 21 bp, Artificial Sequence
  Description of Artificial Sequence:  Synthetic
  misc_feature (3)..(3): 2'-deoxy-2'-fluoro
  misc_feature (6)..(6): 2'-deoxy-2'-fluoro
  misc_feature (8)..(11): 2'-deoxy-2'-fluoro
  misc_feature (13)..(13): 2'-deoxy-2'-fluoro
  misc_feature (16)..(19): 2'-deoxy-2'-fluoro
  misc_feature (20)..(20): Phosphorothioate 3'-Internucleotide Linkage
  misc_feature (1)..(19): ribonucleotide unmodified or modified as described for this sequence
aacagugucuugugacucctt

SEQ ID NO: 1719 - DNA, 21 bp, Artificial Sequence
  Description of Artificial Sequence:  Synthetic
  misc_feature (3)..(4): 2'-deoxy-2'-fluoro
  misc_feature (6)..(6): 2'-deoxy-2'-fluoro
  misc_feature (9)..(10): 2'-deoxy-2'-fluoro
  misc_feature (12)..(12): 2'-deoxy-2'-fluoro
  misc_feature (14)..(17): 2'-deoxy-2'-fluoro
  misc_feature (20)..(20): Phosphorothioate 3'-Internucleotide Linkage
  misc_feature (1)..(19): ribonucleotide unmodified or modified as described for this sequence
ggcuaugguuguguuccagtt

SEQ ID NO: 1720 - DNA, 21 bp, Artificial Sequence
  Description of Artificial Sequence:  Synthetic
  misc_feature (2)..(2): 2'-deoxy-2'-fluoro
  misc_feature (6)..(7): 2'-deoxy-2'-fluoro
  misc_feature (9)..(9): 2'-deoxy-2'-fluoro
  misc_feature (12)..(13): 2'-deoxy-2'-fluoro
  misc_feature (15)..(15): 2'-deoxy-2'-fluoro
  misc_feature (17)..(19): 2'-deoxy-2'-fluoro
  misc_feature (20)..(20): Phosphorothioate 3'-Internucleotide Linkage
  misc_feature (1)..(19): ribonucleotide unmodified or modified as described for this sequence
acaggcuaugguuguguuctt

SEQ ID NO: 1721 - DNA, 21 bp, Artificial Sequence
  Description of Artificial Sequence:  Synthetic
  misc_feature (1)..(3): 2'-deoxy-2'-fluoro
  misc_feature (5)..(10): 2'-deoxy-2'-fluoro
  misc_feature (14)..(16): 2'-deoxy-2'-fluoro
  misc_feature (19)..(19): 2'-deoxy-2'-fluoro
  misc_feature (20)..(20): Phosphorothioate 3'-Internucleotide Linkage
  misc_feature (1)..(19): ribonucleotide unmodified or modified as described for this sequence
cucgucccucaaaucuggutt

SEQ ID NO: 1722 - DNA, 21 bp, Artificial Sequence
  Description of Artificial Sequence:  Synthetic
  misc_feature (1)..(4): 2'-deoxy-2'-fluoro
  misc_feature (6)..(7): 2'-deoxy-2'-fluoro
  misc_feature (9)..(12): 2'-deoxy-2'-fluoro
  misc_feature (16)..(16): 2'-deoxy-2'-fluoro
  misc_feature (18)..(18): 2'-deoxy-2'-fluoro
  misc_feature (20)..(20): Phosphorothioate 3'-Internucleotide Linkage
  misc_feature (1)..(19): ribonucleotide unmodified or modified as described for this sequence
uucuaccgcuuugggcauatt

SEQ ID NO: 1723 - DNA, 21 bp, Artificial Sequence
  Description of Artificial Sequence:  Synthetic
  misc_feature (1)..(1): 5'-3 attached terminal deoxyabasic moiety
  misc_feature (1)..(2): 2'-deoxy
  misc_feature (3)..(3): 2'-deoxy-2'-fluoro
  misc_feature (4)..(6): 2'-deoxy
  misc_feature (7)..(7): 2'-deoxy-2'-fluoro
  misc_feature (8)..(9): 2'-deoxy
  misc_feature (10)..(13): 2'-deoxy-2'-fluoro
  misc_feature (14)..(17): 2'-deoxy
  misc_feature (18)..(18): 2'-deoxy-2'-fluoro
  misc_feature (19)..(19): 2'-deoxy
  misc_feature (1)..(19): ribonucleotide unmodified or modified as described for this sequence
  misc_feature (21)..(21): 3'-3 attached terminal deoxyabasic moiety
aauggacgaccccaggguatt

SEQ ID NO: 1724 - DNA, 21 bp, Artificial Sequence
  Description of Artificial Sequence:  Synthetic
  misc_feature (1)..(1): 5'-3 attached terminal deoxyabasic moiety
  misc_feature (1)..(1): 2'-deoxy
  misc_feature (2)..(3): 2'-deoxy-2'-fluoro
  misc_feature (4)..(4): 2'-deoxy
  misc_feature (5)..(5): 2'-deoxy-2'-fluoro
  misc_feature (6)..(6): 2'-deoxy
  misc_feature (7)..(11): 2'-deoxy-2'-fluoro
  misc_feature (12)..(13): 2'-deoxy
  misc_feature (14)..(16): 2'-deoxy-2'-fluoro
  misc_feature (17)..(19): 2'-deoxy
  misc_feature (1)..(19): ribonucleotide unmodified or modified as described for this sequence
  misc_feature (21)..(21): 3'-3 attached terminal deoxyabasic moiety
guugcacuccugaucuggatt

SEQ ID NO: 1725 - DNA, 21 bp, Artificial Sequence
  Description of Artificial Sequence:  Synthetic
  misc_feature (1)..(1): 5'-3 attached terminal deoxyabasic moiety
  misc_feature (1)..(3): 2'-deoxy
  misc_feature (4)..(4): 2'-deoxy-2'-fluoro
  misc_feature (5)..(5): 2'-deoxy
  misc_feature (6)..(6): 2'-deoxy-2'-fluoro
  misc_feature (7)..(16): 2'-deoxy
  misc_feature (17)..(18): 2'-deoxy-2'-fluoro
  misc_feature (19)..(19): 2'-deoxy
  misc_feature (1)..(19): ribonucleotide unmodified or modified as described for this sequence
  misc_feature (21)..(21): 3'-3 attached terminal deoxyabasic moiety
aagcacagaaagggagucatt

SEQ ID NO: 1726 - DNA, 21 bp, Artificial Sequence
  Description of Artificial Sequence:  Synthetic
  misc_feature (1)..(1): 5'-3 attached terminal deoxyabasic moiety
  misc_feature (1)..(4): 2'-deoxy
  misc_feature (5)..(6): 2'-deoxy-2'-fluoro
  misc_feature (7)..(7): 2'-deoxy
  misc_feature (8)..(8): 2'-deoxy-2'-fluoro
  misc_feature (9)..(12): 2'-deoxy
  misc_feature (13)..(13): 2'-deoxy-2'-fluoro
  misc_feature (14)..(14): 2'-deoxy
  misc_feature (15)..(16): 2'-deoxy-2'-fluoro
  misc_feature (17)..(17): 2'-deoxy
  misc_feature (18)..(19): 2'-deoxy-2'-fluoro
  misc_feature (1)..(19): ribonucleotide unmodified or modified as described for this sequence
  misc_feature (21)..(21): 3'-3 attached terminal deoxyabasic moiety
ggagucacaagacacuguutt

SEQ ID NO: 1727 - DNA, 21 bp, Artificial Sequence
  Description of Artificial Sequence:  Synthetic
  misc_feature (1)..(1): 5'-3 attached terminal deoxyabasic moiety
  misc_feature (1)..(2): 2'-deoxy-2'-fluoro
  misc_feature (3)..(6): 2'-deoxy
  misc_feature (7)..(7): 2'-deoxy-2'-fluoro
  misc_feature (8)..(8): 2'-deoxy
  misc_feature (9)..(9): 2'-deoxy-2'-fluoro
  misc_feature (10)..(11): 2'-deoxy
  misc_feature (12)..(13): 2'-deoxy-2'-fluoro
  misc_feature (14)..(14): 2'-deoxy
  misc_feature (15)..(15): 2'-deoxy-2'-fluoro
  misc_feature (16)..(17): 2'-deoxy
  misc_feature (18)..(19): 2'-deoxy-2'-fluoro
  misc_feature (1)..(19): ribonucleotide unmodified or modified as described for this sequence
  misc_feature (21)..(21): 3'-3 attached terminal deoxyabasic moiety
cuggaacacaaccauagcctt

SEQ ID NO: 1728 - DNA, 21 bp, Artificial Sequence
  Description of Artificial Sequence:  Synthetic
  misc_feature (1)..(1): 5'-3 attached terminal deoxyabasic moiety
  misc_feature (1)..(3): 2'-deoxy
  misc_feature (4)..(4): 2'-deoxy-2'-fluoro
  misc_feature (5)..(5): 2'-deoxy
  misc_feature (6)..(6): 2'-deoxy-2'-fluoro
  misc_feature (7)..(8): 2'-deoxy
  misc_feature (9)..(10): 2'-deoxy-2'-fluoro
  misc_feature (11)..(11): 2'-deoxy
  misc_feature (12)..(12): 2'-deoxy-2'-fluoro
  misc_feature (13)..(14): 2'-deoxy
  misc_feature (15)..(17): 2'-deoxy-2'-fluoro
  misc_feature (18)..(18): 2'-deoxy
  misc_feature (19)..(19): 2'-deoxy-2'-fluoro
  misc_feature (1)..(19): ribonucleotide unmodified or modified as described for this sequence
  misc_feature (21)..(21): 3'-3 attached terminal deoxyabasic moiety
gaacacaaccauagccugutt

SEQ ID NO: 1729 - DNA, 21 bp, Artificial Sequence
  Description of Artificial Sequence:  Synthetic
  misc_feature: 2'-deoxy-2'-fluoro
  misc_feature (1)..(1): 5'-3 attached terminal deoxyabasic moiety
  misc_feature (1)..(1): 2'-deoxy
  misc_feature (2)..(3): 2'-deoxy-2'-fluoro
  misc_feature (4)..(6): 2'-deoxy
  misc_feature (7)..(9): 2'-deoxy-2'-fluoro
  misc_feature (10)..(15): 2'-deoxy
  misc_feature (16)..(16): 2'-deoxy-2'-fluoro
  misc_feature (17)..(19): 2'-deoxy
  misc_feature (1)..(19): ribonucleotide unmodified or modified as described for this sequence
  misc_feature (21)..(21): 3'-3 attached terminal deoxyabasic moiety
accagauuugagggacgagtt

SEQ ID NO: 1730 - DNA, 21 bp, Artificial Sequence
  Description of Artificial Sequence:  Synthetic
  misc_feature: 2'-deoxy-2'-fluoro
  misc_feature (1)..(1): 5'-3 attached terminal deoxyabasic moiety
  misc_feature (1)..(1): 2'-deoxy-2'-fluoro
  misc_feature (2)..(2): 2'-deoxy
  misc_feature (3)..(3): 2'-deoxy-2'-fluoro
  misc_feature (4)..(4): 2'-deoxy
  misc_feature (5)..(7): 2'-deoxy-2'-fluoro
  misc_feature (8)..(11): 2'-deoxy
  misc_feature (12)..(12): 2'-deoxy-2'-fluoro
  misc_feature (13)..(14): 2'-deoxy
  misc_feature (15)..(15): 2'-deoxy-2'-fluoro
  misc_feature (16)..(19): 2'-deoxy
  misc_feature (1)..(19): ribonucleotide unmodified or modified as described for this sequence
  misc_feature (21)..(21): 3'-3 attached terminal deoxyabasic moiety
uaugcccaaagcgguagaatt

SEQ ID NO: 1731 - DNA, 21 bp, Artificial Sequence
  Description of Artificial Sequence:  Synthetic
  misc_feature (1)..(1): 2'-deoxy-2'-fluoro
  misc_feature (2)..(2): 2'-deoxy
  misc_feature (3)..(6): 2'-deoxy-2'-fluoro
  misc_feature (7)..(10): 2'-deoxy
  misc_feature (11)..(12): 2'-deoxy-2'-fluoro
  misc_feature (13)..(13): 2'-deoxy
  misc_feature (14)..(16): 2'-deoxy-2'-fluoro
  misc_feature (17)..(17): 2'-deoxy
  misc_feature (18)..(19): 2'-deoxy-2'-fluoro
  misc_feature (20)..(20): Phosphorothioate 3'-Internucleotide Linkage
  misc_feature (1)..(19): ribonucleotide unmodified or modified as described for this sequence
uacccuggggucguccauutt

SEQ ID NO: 1732 - DNA, 21 bp, Artificial Sequence
  Description of Artificial Sequence:  Synthetic
  misc_feature (1)..(3): 2'-deoxy-2'-fluoro
  misc_feature (4)..(6): 2'-deoxy
  misc_feature (7)..(8): 2'-deoxy-2'-fluoro
  misc_feature (9)..(13): 2'-deoxy
  misc_feature (14)..(14): 2'-deoxy-2'-fluoro
  misc_feature (15)..(15): 2'-deoxy
  misc_feature (16)..(16): 2'-deoxy-2'-fluoro
  misc_feature (17)..(18): 2'-deoxy
  misc_feature (19)..(19): 2'-deoxy-2'-fluoro
  misc_feature (20)..(20): Phosphorothioate 3'-Internucleotide Linkage
  misc_feature (1)..(19): ribonucleotide unmodified or modified as described for this sequence
uccagaucaggagugcaactt

SEQ ID NO: 1733 - DNA, 21 bp, Artificial Sequence
  Description of Artificial Sequence:  Synthetic
  misc_feature (1)..(1): 2'-deoxy-2'-fluoro
  misc_feature (2)..(3): 2'-deoxy
  misc_feature (4)..(13): 2'-deoxy-2'-fluoro
  misc_feature (14)..(14): 2'-deoxy
  misc_feature (15)..(15): 2'-deoxy-2'-fluoro
  misc_feature (16)..(16): 2'-deoxy
  misc_feature (17)..(19): 2'-deoxy-2'-fluoro
  misc_feature (20)..(20): Phosphorothioate 3'-Internucleotide Linkage
  misc_feature (1)..(19): ribonucleotide unmodified or modified as described for this sequence
ugacucccuuucugugcuutt

SEQ ID NO: 1734 - DNA, 21 bp, Artificial Sequence
  Description of Artificial Sequence:  Synthetic
  misc_feature (1)..(2): 2'-deoxy
  misc_feature (3)..(3): 2'-deoxy-2'-fluoro
  misc_feature (4)..(5): 2'-deoxy
  misc_feature (6)..(6): 2'-deoxy-2'-fluoro
  misc_feature (7)..(7): 2'-deoxy
  misc_feature (8)..(11): 2'-deoxy-2'-fluoro
  misc_feature (12)..(12): 2'-deoxy
  misc_feature (13)..(13): 2'-deoxy-2'-fluoro
  misc_feature (14)..(15): 2'-deoxy
  misc_feature (16)..(19): 2'-deoxy-2'-fluoro
  misc_feature (20)..(20): Phosphorothioate 3'-Internucleotide Linkage
  misc_feature (1)..(19): ribonucleotide unmodified or modified as described for this sequence
aacagugucuugugacucctt

SEQ ID NO: 1735 - DNA, 21 bp, Artificial Sequence
  Description of Artificial Sequence:  Synthetic
  misc_feature (1)..(2): 2'-deoxy
  misc_feature (3)..(4): 2'-deoxy-2'-fluoro
  misc_feature (5)..(5): 2'-deoxy
  misc_feature (6)..(6): 2'-deoxy-2'-fluoro
  misc_feature (7)..(8): 2'-deoxy
  misc_feature (9)..(10): 2'-deoxy-2'-fluoro
  misc_feature (11)..(11): 2'-deoxy
  misc_feature (12)..(12): 2'-deoxy-2'-fluoro
  misc_feature (13)..(13): 2'-deoxy
  misc_feature (14)..(17): 2'-deoxy-2'-fluoro
  misc_feature (18)..(19): 2'-deoxy
  misc_feature (20)..(20): Phosphorothioate 3'-Internucleotide Linkage
  misc_feature (1)..(19): ribonucleotide unmodified or modified as described for this sequence
ggcuaugguuguguuccagtt

SEQ ID NO: 1736 - DNA, 21 bp, Artificial Sequence
  Description of Artificial Sequence:  Synthetic
  misc_feature (1)..(1): 2'-deoxy
  misc_feature (2)..(2): 2'-deoxy-2'-fluoro
  misc_feature (3)..(5): 2'-deoxy
  misc_feature (6)..(7): 2'-deoxy-2'-fluoro
  misc_feature (8)..(8): 2'-deoxy
  misc_feature (9)..(9): 2'-deoxy-2'-fluoro
  misc_feature (10)..(11): 2'-deoxy
  misc_feature (12)..(13): 2'-deoxy-2'-fluoro
  misc_feature (14)..(14): 2'-deoxy
  misc_feature (15)..(15): 2'-deoxy-2'-fluoro
  misc_feature (16)..(16): 2'-deoxy
  misc_feature (17)..(19): 2'-deoxy-2'-fluoro
  misc_feature (20)..(20): Phosphorothioate 3'-Internucleotide Linkage
  misc_feature (1)..(19): ribonucleotide unmodified or modified as described for this sequence
acaggcuaugguuguguuctt

SEQ ID NO: 1737 - DNA, 21 bp, Artificial Sequence
  Description of Artificial Sequence:  Synthetic
  misc_feature (1)..(3): 2'-deoxy-2'-fluoro
  misc_feature (4)..(4): 2'-deoxy
  misc_feature (5)..(10): 2'-deoxy-2'-fluoro
  misc_feature (11)..(13): 2'-deoxy
  misc_feature (14)..(16): 2'-deoxy-2'-fluoro
  misc_feature (17)..(18): 2'-deoxy
  misc_feature (19)..(19): 2'-deoxy-2'-fluoro
  misc_feature (20)..(20): Phosphorothioate 3'-Internucleotide Linkage
  misc_feature (1)..(19): ribonucleotide unmodified or modified as described for this sequence
cucgucccucaaaucuggutt

SEQ ID NO: 1738 - DNA, 21 bp, Artificial Sequence
  Description of Artificial Sequence:  Synthetic
  misc_feature (1)..(4): 2'-deoxy-2'-fluoro
  misc_feature (5)..(5): 2'-deoxy
  misc_feature (6)..(7): 2'-deoxy-2'-fluoro
  misc_feature (8)..(8): 2'-deoxy
  misc_feature (9)..(12): 2'-deoxy-2'-fluoro
  misc_feature (13)..(15): 2'-deoxy
  misc_feature (16)..(16): 2'-deoxy-2'-fluoro
  misc_feature (17)..(17): 2'-deoxy
  misc_feature (18)..(18): 2'-deoxy-2'-fluoro
  misc_feature (19)..(19): 2'-deoxy
  misc_feature (20)..(20): Phosphorothioate 3'-Internucleotide Linkage
  misc_feature (1)..(19): ribonucleotide unmodified or modified as described for this sequence
uucuaccgcuuugggcauatt

SEQ ID NO: 1739 - DNA, 21 bp, Artificial Sequence
  Description of Artificial Sequence:  Synthetic
  misc_feature (1)..(1): 5'-3 attached terminal deoxyabasic moiety
  misc_feature (1)..(2): 2'-O-methyl
  misc_feature (3)..(3): 2'-deoxy-2'-fluoro
  misc_feature (4)..(6): 2'-O-methyl
  misc_feature (7)..(7): 2'-deoxy-2'-fluoro
  misc_feature (8)..(9): 2'-O-methyl
  misc_feature (10)..(13): 2'-deoxy-2'-fluoro
  misc_feature (14)..(17): 2'-O-methyl
  misc_feature (18)..(18): 2'-deoxy-2'-fluoro
  misc_feature (19)..(19): 2'-O-methyl
  misc_feature (1)..(19): ribonucleotide unmodified or modified as described for this sequence
  misc_feature (21)..(21): 3'-3 attached terminal deoxyabasic moiety
aauggacgaccccaggguatt

SEQ ID NO: 1740 - DNA, 21 bp, Artificial Sequence
  Description of Artificial Sequence:  Synthetic
  misc_feature (1)..(1): 5'-3 attached terminal deoxyabasic moiety
  misc_feature (1)..(1): 2'-O-methyl
  misc_feature (2)..(3): 2'-deoxy-2'-fluoro
  misc_feature (4)..(4): 2'-O-methyl
  misc_feature (5)..(5): 2'-deoxy-2'-fluoro
  misc_feature (6)..(6): 2'-O-methyl
  misc_feature (7)..(11): 2'-deoxy-2'-fluoro
  misc_feature (12)..(13): 2'-O-methyl
  misc_feature (14)..(16): 2'-deoxy-2'-fluoro
  misc_feature (17)..(19): 2'-O-methyl
  misc_feature (1)..(19): ribonucleotide unmodified or modified as described for this sequence
  misc_feature (21)..(21): 3'-3 attached terminal deoxyabasic moiety
guugcacuccugaucuggatt

SEQ ID NO: 1741 - DNA, 21 bp, Artificial Sequence
  Description of Artificial Sequence:  Synthetic
  misc_feature (1)..(1): 5'-3 attached terminal deoxyabasic moiety
  misc_feature (1)..(3): 2'-O-methyl
  misc_feature (4)..(4): 2'-deoxy-2'-fluoro
  misc_feature (5)..(5): 2'-O-methyl
  misc_feature (6)..(6): 2'-deoxy-2'-fluoro
  misc_feature (7)..(16): 2'-O-methyl
  misc_feature (17)..(18): 2'-deoxy-2'-fluoro
  misc_feature (19)..(19): 2'-O-methyl
  misc_feature (1)..(19): ribonucleotide unmodified or modified as described for this sequence
  misc_feature (21)..(21): 3'-3 attached terminal deoxyabasic moiety
aagcacagaaagggagucatt

SEQ ID NO: 1742 - DNA, 21 bp, Artificial Sequence
  Description of Artificial Sequence:  Synthetic
  misc_feature (1)..(1): 5'-3 attached terminal deoxyabasic moiety
  misc_feature (1)..(4): 2'-O-methyl
  misc_feature (5)..(6): 2'-deoxy-2'-fluoro
  misc_feature (7)..(7): 2'-O-methyl
  misc_feature (8)..(8): 2'-deoxy-2'-fluoro
  misc_feature (9)..(12): 2'-O-methyl
  misc_feature (13)..(13): 2'-deoxy-2'-fluoro
  misc_feature (14)..(14): 2'-O-methyl
  misc_feature (15)..(16): 2'-deoxy-2'-fluoro
  misc_feature (17)..(17): 2'-O-methyl
  misc_feature (18)..(19): 2'-deoxy-2'-fluoro
  misc_feature (1)..(19): ribonucleotide unmodified or modified as described for this sequence
  misc_feature (21)..(21): 3'-3 attached terminal deoxyabasic moiety
ggagucacaagacacuguutt

SEQ ID NO: 1743 - DNA, 21 bp, Artificial Sequence
  Description of Artificial Sequence:  Synthetic
  misc_feature (1)..(1): 5'-3 attached terminal deoxyabasic moiety
  misc_feature (1)..(2): 2'-deoxy-2'-fluoro
  misc_feature (3)..(6): 2'-O-methyl
  misc_feature (7)..(7): 2'-deoxy-2'-fluoro
  misc_feature (8)..(8): 2'-O-methyl
  misc_feature (9)..(9): 2'-deoxy-2'-fluoro
  misc_feature (10)..(11): 2'-O-methyl
  misc_feature (12)..(13): 2'-deoxy-2'-fluoro
  misc_feature (14)..(14): 2'-O-methyl
  misc_feature (15)..(15): 2'-deoxy-2'-fluoro
  misc_feature (16)..(17): 2'-O-methyl
  misc_feature (18)..(19): 2'-deoxy-2'-fluoro
  misc_feature (1)..(19): ribonucleotide unmodified or modified as described for this sequence
  misc_feature (21)..(21): 3'-3 attached terminal deoxyabasic moiety
cuggaacacaaccauagcctt

SEQ ID NO: 1744 - DNA, 21 bp, Artificial Sequence
  Description of Artificial Sequence:  Synthetic
  misc_feature (1)..(1): 5'-3 attached terminal deoxyabasic moiety
  misc_feature (1)..(3): 2'-O-methyl
  misc_feature (4)..(4): 2'-deoxy-2'-fluoro
  misc_feature (5)..(5): 2'-O-methyl
  misc_feature (6)..(6): 2'-deoxy-2'-fluoro
  misc_feature (7)..(8): 2'-O-methyl
  misc_feature (9)..(10): 2'-deoxy-2'-fluoro
  misc_feature (11)..(11): 2'-O-methyl
  misc_feature (12)..(12): 2'-deoxy-2'-fluoro
  misc_feature (13)..(14): 2'-O-methyl
  misc_feature (15)..(17): 2'-deoxy-2'-fluoro
  misc_feature (18)..(18): 2'-O-methyl
  misc_feature (19)..(19): 2'-deoxy-2'-fluoro
  misc_feature (1)..(19): ribonucleotide unmodified or modified as described for this sequence
  misc_feature (21)..(21): 3'-3 attached terminal deoxyabasic moiety
gaacacaaccauagccugutt

SEQ ID NO: 1745 - DNA, 21 bp, Artificial Sequence
  Description of Artificial Sequence:  Synthetic
  misc_feature (1)..(1): 5'-3 attached terminal deoxyabasic moiety
  misc_feature (1)..(1): 2'-O-methyl
  misc_feature (2)..(3): 2'-deoxy-2'-fluoro
  misc_feature (4)..(6): 2'-O-methyl
  misc_feature (7)..(9): 2'-deoxy-2'-fluoro
  misc_feature (10)..(15): 2'-O-methyl
  misc_feature (16)..(16): 2'-deoxy-2'-fluoro
  misc_feature (17)..(19): 2'-O-methyl
  misc_feature (1)..(19): ribonucleotide unmodified or modified as described for this sequence
  misc_feature (21)..(21): 3'-3 attached terminal deoxyabasic moiety
accagauuugagggacgagtt

SEQ ID NO: 1746 - DNA, 21 bp, Artificial Sequence
  Description of Artificial Sequence:  Synthetic
  misc_feature (1)..(1): 5'-3 attached terminal deoxyabasic moiety
  misc_feature (1)..(1): 2'-deoxy-2'-fluoro
  misc_feature (2)..(2): 2'-O-methyl
  misc_feature (3)..(3): 2'-deoxy-2'-fluoro
  misc_feature (4)..(4): 2'-O-methyl
  misc_feature (5)..(7): 2'-deoxy-2'-fluoro
  misc_feature (8)..(11): 2'-O-methyl
  misc_feature (12)..(12): 2'-deoxy-2'-fluoro
  misc_feature (13)..(14): 2'-O-methyl
  misc_feature (15)..(15): 2'-deoxy-2'-fluoro
  misc_feature (16)..(19): 2'-O-methyl
  misc_feature (1)..(19): ribonucleotide unmodified or modified as described for this sequence
  misc_feature (21)..(21): 3'-3 attached terminal deoxyabasic moiety
uaugcccaaagcgguagaatt

SEQ ID NO: 1747 - DNA, 21 bp, Artificial Sequence
  Description of Artificial Sequence:  Synthetic
  misc_feature (1)..(1): 2'-deoxy-2'-fluoro
  misc_feature (2)..(2): 2'-O-methyl
  misc_feature (3)..(6): 2'-deoxy-2'-fluoro
  misc_feature (7)..(10): 2'-O-methyl
  misc_feature (11)..(12): 2'-deoxy-2'-fluoro
  misc_feature (13)..(13): 2'-O-methyl
  misc_feature (14)..(16): 2'-deoxy-2'-fluoro
  misc_feature (17)..(17): 2'-O-methyl
  misc_feature (18)..(19): 2'-deoxy-2'-fluoro
  misc_feature (20)..(20): Phosphorothioate 3'-Internucleotide Linkage
  misc_feature (1)..(19): ribonucleotide unmodified or modified as described for this sequence
uacccuggggucguccauutt

SEQ ID NO: 1748 - DNA, 21 bp, Artificial Sequence
  Description of Artificial Sequence:  Synthetic
  misc_feature (1)..(3): 2'-deoxy-2'-fluoro
  misc_feature (4)..(6): 2'-O-methyl
  misc_feature (7)..(8): 2'-deoxy-2'-fluoro
  misc_feature (9)..(13): 2'-O-methyl
  misc_feature (14)..(14): 2'-deoxy-2'-fluoro
  misc_feature (15)..(15): 2'-O-methyl
  misc_feature (16)..(16): 2'-deoxy-2'-fluoro
  misc_feature (17)..(18): 2'-O-methyl
  misc_feature (19)..(19): 2'-deoxy-2'-fluoro
  misc_feature (20)..(20): Phosphorothioate 3'-Internucleotide Linkage
  misc_feature (1)..(19): ribonucleotide unmodified or modified as described for this sequence
uccagaucaggagugcaactt

SEQ ID NO: 1749 - DNA, 21 bp, Artificial Sequence
  Description of Artificial Sequence:  Synthetic
  misc_feature (1)..(1): 2'-deoxy-2'-fluoro
  misc_feature (2)..(3): 2'-O-methyl
  misc_feature (4)..(13): 2'-deoxy-2'-fluoro
  misc_feature (14)..(14): 2'-O-methyl
  misc_feature (15)..(15): 2'-deoxy-2'-fluoro
  misc_feature (16)..(16): 2'-O-methyl
  misc_feature (17)..(19): 2'-deoxy-2'-fluoro
  misc_feature (20)..(20): Phosphorothioate 3'-Internucleotide Linkage
  misc_feature (1)..(19): ribonucleotide unmodified or modified as described for this sequence
ugacucccuuucugugcuutt

SEQ ID NO: 1750 - DNA, 21 bp, Artificial Sequence
  Description of Artificial Sequence:  Synthetic
  misc_feature (1)..(2): 2'-O-methyl
  misc_feature (3)..(3): 2'-deoxy-2'-fluoro
  misc_feature (4)..(5): 2'-O-methyl
  misc_feature (6)..(6): 2'-deoxy-2'-fluoro
  misc_feature (7)..(7): 2'-O-methyl
  misc_feature (8)..(11): 2'-deoxy-2'-fluoro
  misc_feature (12)..(12): 2'-O-methyl
  misc_feature (13)..(13): 2'-deoxy-2'-fluoro
  misc_feature (14)..(15): 2'-O-methyl
  misc_feature (16)..(19): 2'-deoxy-2'-fluoro
  misc_feature (20)..(20): Phosphorothioate 3'-Internucleotide Linkage
  misc_feature (1)..(19): ribonucleotide unmodified or modified as described for this sequence
aacagugucuugugacucctt

SEQ ID NO: 1751 - DNA, 21 bp, Artificial Sequence
  Description of Artificial Sequence:  Synthetic
  misc_feature (1)..(2): 2'-O-methyl
  misc_feature (3)..(4): 2'-deoxy-2'-fluoro
  misc_feature (5)..(5): 2'-O-methyl
  misc_feature (6)..(6): 2'-deoxy-2'-fluoro
  misc_feature (7)..(8): 2'-O-methyl
  misc_feature (9)..(10): 2'-deoxy-2'-fluoro
  misc_feature (11)..(11): 2'-O-methyl
  misc_feature (12)..(12): 2'-deoxy-2'-fluoro
  misc_feature (13)..(13): 2'-O-methyl
  misc_feature (14)..(17): 2'-deoxy-2'-fluoro
  misc_feature (18)..(19): 2'-O-methyl
  misc_feature (20)..(20): Phosphorothioate 3'-Internucleotide Linkage
  misc_feature (1)..(19): ribonucleotide unmodified or modified as described for this sequence
ggcuaugguuguguuccagtt

SEQ ID NO: 1752 - DNA, 21 bp, Artificial Sequence
  Description of Artificial Sequence:  Synthetic
  misc_feature (1)..(1): 2'-O-methyl
  misc_feature (2)..(2): 2'-deoxy-2'-fluoro
  misc_feature (3)..(5): 2'-O-methyl
  misc_feature (6)..(7): 2'-deoxy-2'-fluoro
  misc_feature (8)..(8): 2'-O-methyl
  misc_feature (9)..(9): 2'-deoxy-2'-fluoro
  misc_feature (10)..(11): 2'-O-methyl
  misc_feature (12)..(13): 2'-deoxy-2'-fluoro
  misc_feature (14)..(14): 2'-O-methyl
  misc_feature (15)..(15): 2'-deoxy-2'-fluoro
  misc_feature (16)..(16): 2'-O-methyl
  misc_feature (17)..(19): 2'-deoxy-2'-fluoro
  misc_feature (20)..(20): Phosphorothioate 3'-Internucleotide Linkage
  misc_feature (1)..(19): ribonucleotide unmodified or modified as described for this sequence
acaggcuaugguuguguuctt

SEQ ID NO: 1753 - DNA, 21 bp, Artificial Sequence
  Description of Artificial Sequence:  Synthetic
  misc_feature (1)..(3): 2'-deoxy-2'-fluoro
  misc_feature (4)..(4): 2'-O-methyl
  misc_feature (5)..(10): 2'-deoxy-2'-fluoro
  misc_feature (11)..(13): 2'-O-methyl
  misc_feature (14)..(16): 2'-deoxy-2'-fluoro
  misc_feature (17)..(18): 2'-O-methyl
  misc_feature (19)..(19): 2'-deoxy-2'-fluoro
  misc_feature (20)..(20): Phosphorothioate 3'-Internucleotide Linkage
  misc_feature (1)..(19): ribonucleotide unmodified or modified as described for this sequence
cucgucccucaaaucuggutt

SEQ ID NO: 1754 - DNA, 21 bp, Artificial Sequence
  Description of Artificial Sequence:  Synthetic
  misc_feature (1)..(4): 2'-deoxy-2'-fluoro
  misc_feature (5)..(5): 2'-O-methyl
  misc_feature (6)..(7): 2'-deoxy-2'-fluoro
  misc_feature (8)..(8): 2'-O-methyl
  misc_feature (9)..(12): 2'-deoxy-2'-fluoro
  misc_feature (13)..(15): 2'-O-methyl
  misc_feature (16)..(16): 2'-deoxy-2'-fluoro
  misc_feature (17)..(17): 2'-O-methyl
  misc_feature (18)..(18): 2'-deoxy-2'-fluoro
  misc_feature (19)..(19): 2'-O-methyl
  misc_feature (20)..(20): Phosphorothioate 3'-Internucleotide Linkage
  misc_feature (1)..(19): ribonucleotide unmodified or modified as described for this sequence
uucuaccgcuuugggcauatt

SEQ ID NO: 1755 - DNA, 21 bp, Artificial Sequence
  Description of Artificial Sequence:  Synthetic
  misc_feature (1)..(1): 5'-3 attached terminal deoxyabasic moiety
  misc_feature (1)..(19): ribonucleotide unmodified or modified as described for this sequence
  misc_feature (21)..(21): 3'-3 attached terminal deoxyabasic moiety
aauggacgaccccaggguatt

SEQ ID NO: 1756 - DNA, 21 bp, Artificial Sequence
  Description of Artificial Sequence:  Synthetic
  misc_feature (1)..(1): 5'-3 attached terminal deoxyabasic moiety
  misc_feature (1)..(19): ribonucleotide unmodified or modified as described for this sequence
  misc_feature (21)..(21): 3'-3 attached terminal deoxyabasic moiety
guugcacuccugaucuggatt

SEQ ID NO: 1757 - DNA, 21 bp, Artificial Sequence
  Description of Artificial Sequence:  Synthetic
  misc_feature (1)..(1): 5'-3 attached terminal deoxyabasic moiety
  misc_feature (1)..(19): ribonucleotide unmodified or modified as described for this sequence
  misc_feature (21)..(21): 3'-3 attached terminal deoxyabasic moiety
aagcacagaaagggagucatt

SEQ ID NO: 1758 - DNA, 21 bp, Artificial Sequence
  Description of Artificial Sequence:  Synthetic
  misc_feature (1)..(1): 5'-3 attached terminal deoxyabasic moiety
  misc_feature (1)..(19): ribonucleotide unmodified or modified as described for this sequence
  misc_feature (21)..(21): 3'-3 attached terminal deoxyabasic moiety
ggagucacaagacacuguutt

SEQ ID NO: 1759 - DNA, 21 bp, Artificial Sequence
  Description of Artificial Sequence:  Synthetic
  misc_feature (1)..(1): 5'-3 attached terminal deoxyabasic moiety
  misc_feature (1)..(19): ribonucleotide unmodified or modified as described for this sequence
  misc_feature (21)..(21): 3'-3 attached terminal deoxyabasic moiety
cuggaacacaaccauagcctt

SEQ ID NO: 1760 - DNA, 21 bp, Artificial Sequence
  Description of Artificial Sequence:  Synthetic
  misc_feature (1)..(1): 5'-3 attached terminal deoxyabasic moiety
  misc_feature (1)..(19): ribonucleotide unmodified or modified as described for this sequence
  misc_feature (21)..(21): 3'-3 attached terminal deoxyabasic moiety
gaacacaaccauagccugutt

SEQ ID NO: 1761 - DNA, 21 bp, Artificial Sequence
  Description of Artificial Sequence:  Synthetic
  misc_feature (1)..(1): 5'-3 attached terminal deoxyabasic moiety
  misc_feature (1)..(19): ribonucleotide unmodified or modified as described for this sequence
  misc_feature (21)..(21): 3'-3 attached terminal deoxyabasic moiety
accagauuugagggacgagtt

SEQ ID NO: 1762 - DNA, 21 bp, Artificial Sequence
  Description of Artificial Sequence:  Synthetic
  misc_feature (1)..(1): 5'-3 attached terminal deoxyabasic moiety
  misc_feature (1)..(19): ribonucleotide unmodified or modified as described for this sequence
  misc_feature (21)..(21): 3'-3 attached terminal deoxyabasic moiety
uaugcccaaagcgguagaatt

SEQ ID NO: 1763 - DNA, 21 bp, Artificial Sequence
  Description of Artificial Sequence:  Synthetic
  misc_feature (20)..(20): Phosphorothioate 3'-Internucleotide Linkage
  misc_feature (1)..(19): ribonucleotide unmodified or modified as described for this sequence
uacccuggggucguccauutt

SEQ ID NO: 1764 - DNA, 21 bp, Artificial Sequence
  Description of Artificial Sequence:  Synthetic
  misc_feature (20)..(20): Phosphorothioate 3'-Internucleotide Linkage
  misc_feature (1)..(19): ribonucleotide unmodified or modified as described for this sequence
uccagaucaggagugcaactt

SEQ ID NO: 1765 - DNA, 21 bp, Artificial Sequence
  Description of Artificial Sequence:  Synthetic
  misc_feature (20)..(20): Phosphorothioate 3'-Internucleotide Linkage
  misc_feature (1)..(19): ribonucleotide unmodified or modified as described for this sequence
ugacucccuuucugugcuutt

SEQ ID NO: 1766 - DNA, 21 bp, Artificial Sequence
  Description of Artificial Sequence:  Synthetic
  misc_feature (20)..(20): Phosphorothioate 3'-Internucleotide Linkage
  misc_feature (1)..(19): ribonucleotide unmodified or modified as described for this sequence
aacagugucuugugacucctt

SEQ ID NO: 1767 - DNA, 21 bp, Artificial Sequence
  Description of Artificial Sequence:  Synthetic
  misc_feature (20)..(20): Phosphorothioate 3'-Internucleotide Linkage
  misc_feature (1)..(19): ribonucleotide unmodified or modified as described for this sequence
ggcuaugguuguguuccagtt

SEQ ID NO: 1768 - DNA, 21 bp, Artificial Sequence
  Description of Artificial Sequence:  Synthetic
  misc_feature (20)..(20): Phosphorothioate 3'-Internucleotide Linkage
  misc_feature (1)..(19): ribonucleotide unmodified or modified as described for this sequence
acaggcuaugguuguguuctt

SEQ ID NO: 1769 - DNA, 21 bp, Artificial Sequence
  Description of Artificial Sequence:  Synthetic
  misc_feature (20)..(20): Phosphorothioate 3'-Internucleotide Linkage
  misc_feature (1)..(19): ribonucleotide unmodified or modified as described for this sequence
cucgucccucaaaucuggutt

SEQ ID NO: 1770 - DNA, 21 bp, Artificial Sequence
  Description of Artificial Sequence:  Synthetic
  misc_feature (20)..(20): Phosphorothioate 3'-Internucleotide Linkage
  misc_feature (1)..(19): ribonucleotide unmodified or modified as described for this sequence
uucuaccgcuuugggcauatt

SEQ ID NO: 1771 - DNA, 21 bp, Artificial Sequence
  Description of Artificial Sequence:  Synthetic
  misc_feature (1)..(1): 2'-deoxy-2'-fluoro
  misc_feature (2)..(2): 2'-O-methyl
  misc_feature (3)..(6): 2'-deoxy-2'-fluoro
  misc_feature (7)..(10): 2'-O-methyl
  misc_feature (11)..(12): 2'-deoxy-2'-fluoro
  misc_feature (13)..(13): 2'-O-methyl
  misc_feature (14)..(16): 2'-deoxy-2'-fluoro
  misc_feature (17)..(17): 2'-O-methyl
  misc_feature (18)..(19): 2'-deoxy-2'-fluoro
  misc_feature (1)..(19): ribonucleotide unmodified or modified as described for this sequence
  misc_feature (21)..(21): 3'-3 attached terminal deoxyabasic moiety
uacccuggggucguccauutt

SEQ ID NO: 1772 - DNA, 21 bp, Artificial Sequence
  Description of Artificial Sequence:  Synthetic
  misc_feature (1)..(3): 2'-deoxy-2'-fluoro
  misc_feature (4)..(6): 2'-O-methyl
  misc_feature (7)..(8): 2'-deoxy-2'-fluoro
  misc_feature (9)..(13): 2'-O-methyl
  misc_feature (14)..(14): 2'-deoxy-2'-fluoro
  misc_feature (15)..(15): 2'-O-methyl
  misc_feature (16)..(16): 2'-deoxy-2'-fluoro
  misc_feature (17)..(18): 2'-O-methyl
  misc_feature (19)..(19): 2'-deoxy-2'-fluoro
  misc_feature (1)..(19): ribonucleotide unmodified or modified as described for this sequence
  misc_feature (21)..(21): 3'-3 attached terminal deoxyabasic moiety
uccagaucaggagugcaactt

SEQ ID NO: 1773 - DNA, 21 bp, Artificial Sequence
  Description of Artificial Sequence:  Synthetic
  misc_feature (1)..(1): 2'-deoxy-2'-fluoro
  misc_feature (2)..(3): 2'-O-methyl
  misc_feature (4)..(13): 2'-deoxy-2'-fluoro
  misc_feature (14)..(14): 2'-O-methyl
  misc_feature (15)..(15): 2'-deoxy-2'-fluoro
  misc_feature (16)..(16): 2'-O-methyl
  misc_feature (17)..(19): 2'-deoxy-2'-fluoro
  misc_feature (1)..(19): ribonucleotide unmodified or modified as described for this sequence
  misc_feature (21)..(21): 3'-3 attached terminal deoxyabasic moiety
ugacucccuuucugugcuutt

SEQ ID NO: 1774 - DNA, 21 bp, Artificial Sequence
  Description of Artificial Sequence:  Synthetic
  misc_feature (1)..(2): 2'-O-methyl
  misc_feature (3)..(3): 2'-deoxy-2'-fluoro
  misc_feature (4)..(5): 2'-O-methyl
  misc_feature (6)..(6): 2'-deoxy-2'-fluoro
  misc_feature (7)..(7): 2'-O-methyl
  misc_feature (8)..(11): 2'-deoxy-2'-fluoro
  misc_feature (12)..(12): 2'-O-methyl
  misc_feature (13)..(13): 2'-deoxy-2'-fluoro
  misc_feature (14)..(15): 2'-O-methyl
  misc_feature (16)..(19): 2'-deoxy-2'-fluoro
  misc_feature (1)..(19): ribonucleotide unmodified or modified as described for this sequence
  misc_feature (21)..(21): 3'-3 attached terminal deoxyabasic moiety
aacagugucuugugacucctt

SEQ ID NO: 1775 - DNA, 21 bp, Artificial Sequence
  Description of Artificial Sequence:  Synthetic
  misc_feature (1)..(2): 2'-O-methyl
  misc_feature (3)..(4): 2'-deoxy-2'-fluoro
  misc_feature (5)..(5): 2'-O-methyl
  misc_feature (6)..(6): 2'-deoxy-2'-fluoro
  misc_feature (7)..(8): 2'-O-methyl
  misc_feature (9)..(10): 2'-deoxy-2'-fluoro
  misc_feature (11)..(11): 2'-O-methyl
  misc_feature (12)..(12): 2'-deoxy-2'-fluoro
  misc_feature (13)..(13): 2'-O-methyl
  misc_feature (14)..(17): 2'-deoxy-2'-fluoro
  misc_feature (18)..(19): 2'-O-methyl
  misc_feature (1)..(19): ribonucleotide unmodified or modified as described for this sequence
  misc_feature (21)..(21): 3'-3 attached terminal deoxyabasic moiety
ggcuaugguuguguuccagtt

SEQ ID NO: 1776 - DNA, 21 bp, Artificial Sequence
  Description of Artificial Sequence:  Synthetic
  misc_feature (1)..(1): 2'-O-methyl
  misc_feature (2)..(2): 2'-deoxy-2'-fluoro
  misc_feature (3)..(5): 2'-O-methyl
  misc_feature (6)..(7): 2'-deoxy-2'-fluoro
  misc_feature (8)..(8): 2'-O-methyl
  misc_feature (9)..(9): 2'-deoxy-2'-fluoro
  misc_feature (10)..(11): 2'-O-methyl
  misc_feature (12)..(13): 2'-deoxy-2'-fluoro
  misc_feature (14)..(14): 2'-O-methyl
  misc_feature (15)..(15): 2'-deoxy-2'-fluoro
  misc_feature (16)..(16): 2'-O-methyl
  misc_feature (17)..(19): 2'-deoxy-2'-fluoro
  misc_feature (1)..(19): ribonucleotide unmodified or modified as described for this sequence
  misc_feature (21)..(21): 3'-3 attached terminal deoxyabasic moiety
acaggcuaugguuguguuctt

SEQ ID NO: 1777 - DNA, 21 bp, Artificial Sequence
  Description of Artificial Sequence:  Synthetic
  misc_feature (1)..(3): 2'-deoxy-2'-fluoro
  misc_feature (4)..(4): 2'-O-methyl
  misc_feature (5)..(10): 2'-deoxy-2'-fluoro
  misc_feature (11)..(13): 2'-O-methyl
  misc_feature (14)..(16): 2'-deoxy-2'-fluoro
  misc_feature (17)..(18): 2'-O-methyl
  misc_feature (19)..(19): 2'-deoxy-2'-fluoro
  misc_feature (1)..(19): ribonucleotide unmodified or modified as described for this sequence
  misc_feature (21)..(21): 3'-3 attached terminal deoxyabasic moiety
cucgucccucaaaucuggutt

SEQ ID NO: 1778 - DNA, 21 bp, Artificial Sequence
  Description of Artificial Sequence:  Synthetic
  misc_feature (1)..(4): 2'-deoxy-2'-fluoro
  misc_feature (5)..(5): 2'-O-methyl
  misc_feature (6)..(7): 2'-deoxy-2'-fluoro
  misc_feature (8)..(8): 2'-O-methyl
  misc_feature (9)..(12): 2'-deoxy-2'-fluoro
  misc_feature (13)..(15): 2'-O-methyl
  misc_feature (16)..(16): 2'-deoxy-2'-fluoro
  misc_feature (17)..(17): 2'-O-methyl
  misc_feature (18)..(18): 2'-deoxy-2'-fluoro
  misc_feature (19)..(19): 2'-O-methyl
  misc_feature (1)..(19): ribonucleotide unmodified or modified as described for this sequence
  misc_feature (21)..(21): 3'-3 attached terminal deoxyabasic moiety
uucuaccgcuuugggcauatt

SEQ ID NO: 1779 - DNA, 21 bp, Artificial Sequence
  Description of Artificial Sequence:  Synthetic
  misc_feature (1)..(19): ribonucleotide unmodified or modified as described for this sequence
  misc_feature (21)..(21): 3'-3 attached terminal deoxyabasic moiety
uacccuggggucguccauutt

SEQ ID NO: 1780 - DNA, 21 bp, Artificial Sequence
  Description of Artificial Sequence:  Synthetic
  misc_feature (1)..(19): ribonucleotide unmodified or modified as described for this sequence
  misc_feature (21)..(21): 3'-3 attached terminal deoxyabasic moiety
uccagaucaggagugcaactt

SEQ ID NO: 1781 - DNA, 21 bp, Artificial Sequence
  Description of Artificial Sequence:  Synthetic
  misc_feature (1)..(19): ribonucleotide unmodified or modified as described for this sequence
  misc_feature (21)..(21): 3'-3 attached terminal deoxyabasic moiety
ugacucccuuucugugcuutt

SEQ ID NO: 1782 - DNA, 21 bp, Artificial Sequence
  Description of Artificial Sequence:  Synthetic
  misc_feature (1)..(19): ribonucleotide unmodified or modified as described for this sequence
  misc_feature (21)..(21): 3'-3 attached terminal deoxyabasic moiety
aacagugucuugugacucctt

SEQ ID NO: 1783 - DNA, 21 bp, Artificial Sequence
  Description of Artificial Sequence:  Synthetic
  misc_feature (1)..(19): ribonucleotide unmodified or modified as described for this sequence
  misc_feature (21)..(21): 3'-3 attached terminal deoxyabasic moiety
ggcuaugguuguguuccagtt

SEQ ID NO: 1784 - DNA, 21 bp, Artificial Sequence
  Description of Artificial Sequence:  Synthetic
  misc_feature (1)..(19): ribonucleotide unmodified or modified as described for this sequence
  misc_feature (21)..(21): 3'-3 attached terminal deoxyabasic moiety
acaggcuaugguuguguuctt

SEQ ID NO: 1785 - DNA, 21 bp, Artificial Sequence
  Description of Artificial Sequence:  Synthetic
  misc_feature (1)..(19): ribonucleotide unmodified or modified as described for this sequence
  misc_feature (21)..(21): 3'-3 attached terminal deoxyabasic moiety
cucgucccucaaaucuggutt

SEQ ID NO: 1786 - DNA, 21 bp, Artificial Sequence
  Description of Artificial Sequence:  Synthetic
  misc_feature (1)..(19): ribonucleotide unmodified or modified as described for this sequence
  misc_feature (21)..(21): 3'-3 attached terminal deoxyabasic moiety
uucuaccgcuuugggcauatt

SEQ ID NO: 1787 - DNA, 21 bp, Artificial Sequence
  Description of Artificial Sequence:  Synthetic
  misc_feature (1)..(19): ribonucleotide unmodified or modified as described for this sequence
acugaugaagaaacugaggtt

SEQ ID NO: 1788 - DNA, 21 bp, Artificial Sequence
  Description of Artificial Sequence:  Synthetic
  misc_feature (1)..(19): ribonucleotide unmodified or modified as described for this sequence
ccagggagcaucauucauutt

SEQ ID NO: 1789 - DNA, 21 bp, Artificial Sequence
  Description of Artificial Sequence:  Synthetic
  misc_feature (1)..(19): ribonucleotide unmodified or modified as described for this sequence
cgcuaugucuguaguggggtt

SEQ ID NO: 1790 - DNA, 21 bp, Artificial Sequence
  Description of Artificial Sequence:  Synthetic
  misc_feature (1)..(19): ribonucleotide unmodified or modified as described for this sequence
gagcugacccucaaauacgtt

SEQ ID NO: 1791 - DNA, 21 bp, Artificial Sequence
  Description of Artificial Sequence:  Synthetic
  misc_feature (1)..(19): ribonucleotide unmodified or modified as described for this sequence
cgacauucacugaggacactt

SEQ ID NO: 1792 - DNA, 21 bp, Artificial Sequence
  Description of Artificial Sequence:  Synthetic
  misc_feature (1)..(19): ribonucleotide unmodified or modified as described for this sequence
gcucaagaccuacaaugugtt

SEQ ID NO: 1793 - DNA, 21 bp, Artificial Sequence
  Description of Artificial Sequence:  Synthetic
  misc_feature (1)..(19): ribonucleotide unmodified or modified as described for this sequence
cuacaauguggccauggactt

SEQ ID NO: 1794 - DNA, 21 bp, Artificial Sequence
  Description of Artificial Sequence:  Synthetic
  misc_feature (1)..(19): ribonucleotide unmodified or modified as described for this sequence
guguucccaaugcuuuguctt

SEQ ID NO: 1795 - DNA, 21 bp, Artificial Sequence
  Description of Artificial Sequence:  Synthetic
  misc_feature (1)..(19): ribonucleotide unmodified or modified as described for this sequence
ccucaguuucuucaucagutt

SEQ ID NO: 1796 - DNA, 21 bp, Artificial Sequence
  Description of Artificial Sequence:  Synthetic
  misc_feature (1)..(19): ribonucleotide unmodified or modified as described for this sequence
aaugaaugaugcucccuggtt

SEQ ID NO: 1797 - DNA, 21 bp, Artificial Sequence
  Description of Artificial Sequence:  Synthetic
  misc_feature (1)..(19): ribonucleotide unmodified or modified as described for this sequence
ccccacuacagacauagcgtt

SEQ ID NO: 1798 - DNA, 21 bp, Artificial Sequence
  Description of Artificial Sequence:  Synthetic
  misc_feature (1)..(19): ribonucleotide unmodified or modified as described for this sequence
cguauuugagggucagcuctt

SEQ ID NO: 1799 - DNA, 21 bp, Artificial Sequence
  Description of Artificial Sequence:  Synthetic
  misc_feature (1)..(19): ribonucleotide unmodified or modified as described for this sequence
guguccucagugaaugucgtt

SEQ ID NO: 1800 - DNA, 21 bp, Artificial Sequence
  Description of Artificial Sequence:  Synthetic
  misc_feature (1)..(19): ribonucleotide unmodified or modified as described for this sequence
cacauuguaggucuugagctt

SEQ ID NO: 1801 - DNA, 21 bp, Artificial Sequence
  Description of Artificial Sequence:  Synthetic
  misc_feature (1)..(19): ribonucleotide unmodified or modified as described for this sequence
guccauggccacauuguagtt

SEQ ID NO: 1802 - DNA, 21 bp, Artificial Sequence
  Description of Artificial Sequence:  Synthetic
  misc_feature (1)..(19): ribonucleotide unmodified or modified as described for this sequence
gacaaagcauugggaacactt

SEQ ID NO: 1803 - DNA, 21 bp, Artificial Sequence
  Description of Artificial Sequence:  Synthetic
  misc_feature: 2'-deoxy-2'-fluoro
  misc_feature (1)..(1): 5'-3 attached terminal deoxyabasic moiety
  misc_feature (2)..(3): 2'-deoxy-2'-fluoro
  misc_feature (6)..(6): 2'-deoxy-2'-fluoro
  misc_feature (14)..(15): 2'-deoxy-2'-fluoro
  misc_feature (1)..(19): ribonucleotide unmodified or modified as described for this sequence
  misc_feature (21)..(21): 3'-3 attached terminal deoxyabasic moiety
acugaugaagaaacugaggtt

SEQ ID NO: 1804 - DNA, 21 bp, Artificial Sequence
  Description of Artificial Sequence:  Synthetic
  misc_feature (1)..(1): 5'-3 attached terminal deoxyabasic moiety
  misc_feature (1)..(2): 2'-deoxy-2'-fluoro
  misc_feature (9)..(9): 2'-deoxy-2'-fluoro
  misc_feature (11)..(12): 2'-deoxy-2'-fluoro
  misc_feature (14)..(16): 2'-deoxy-2'-fluoro
  misc_feature (18)..(19): 2'-deoxy-2'-fluoro
  misc_feature (1)..(19): ribonucleotide unmodified or modified as described for this sequence
  misc_feature (21)..(21): 3'-3 attached terminal deoxyabasic moiety
ccagggagcaucauucauutt

SEQ ID NO: 1805 - DNA, 21 bp, Artificial Sequence
  Description of Artificial Sequence:  Synthetic
  misc_feature (1)..(1): 5'-3 attached terminal deoxyabasic moiety
  misc_feature (1)..(1): 2'-deoxy-2'-fluoro
  misc_feature (3)..(4): 2'-deoxy-2'-fluoro
  misc_feature (6)..(6): 2'-deoxy-2'-fluoro
  misc_feature (8)..(10): 2'-deoxy-2'-fluoro
  misc_feature (12)..(12): 2'-deoxy-2'-fluoro
  misc_feature (15)..(15): 2'-deoxy-2'-fluoro
  misc_feature (1)..(19): ribonucleotide unmodified or modified as described for this sequence
  misc_feature (21)..(21): 3'-3 attached terminal deoxyabasic moiety
cgcuaugucuguaguggggtt

SEQ ID NO: 1806 - DNA, 21 bp, Artificial Sequence
  Description of Artificial Sequence:  Synthetic
  misc_feature (1)..(1): 5'-3 attached terminal deoxyabasic moiety
  misc_feature (4)..(5): 2'-deoxy-2'-fluoro
  misc_feature (8)..(12): 2'-deoxy-2'-fluoro
  misc_feature (16)..(16): 2'-deoxy-2'-fluoro
  misc_feature (18)..(18): 2'-deoxy-2'-fluoro
  misc_feature (1)..(19): ribonucleotide unmodified or modified as described for this sequence
  misc_feature (21)..(21): 3'-3 attached terminal deoxyabasic moiety
gagcugacccucaaauacgtt

SEQ ID NO: 1807 - DNA, 21 bp, Artificial Sequence
  Description of Artificial Sequence:  Synthetic
  misc_feature (1)..(1): 5'-3 attached terminal deoxyabasic moiety
  misc_feature (1)..(1): 2'-deoxy-2'-fluoro
  misc_feature (4)..(4): 2'-deoxy-2'-fluoro
  misc_feature (6)..(8): 2'-deoxy-2'-fluoro
  misc_feature (10)..(11): 2'-deoxy-2'-fluoro
  misc_feature (17)..(17): 2'-deoxy-2'-fluoro
  misc_feature (19)..(19): 2'-deoxy-2'-fluoro
  misc_feature (1)..(19): ribonucleotide unmodified or modified as described for this sequence
  misc_feature (21)..(21): 3'-3 attached terminal deoxyabasic moiety
cgacauucacugaggacactt

SEQ ID NO: 1808 - DNA, 21 bp, Artificial Sequence
  Description of Artificial Sequence:  Synthetic
  misc_feature (1)..(1): 5'-3 attached terminal deoxyabasic moiety
  misc_feature (2)..(4): 2'-deoxy-2'-fluoro
  misc_feature (9)..(11): 2'-deoxy-2'-fluoro
  misc_feature (13)..(13): 2'-deoxy-2'-fluoro
  misc_feature (16)..(16): 2'-deoxy-2'-fluoro
  misc_feature (18)..(18): 2'-deoxy-2'-fluoro
  misc_feature (1)..(19): ribonucleotide unmodified or modified as described for this sequence
  misc_feature (21)..(21): 3'-3 attached terminal deoxyabasic moiety
gcucaagaccuacaaugugtt

SEQ ID NO: 1809 - DNA, 21 bp, Artificial Sequence
  Description of Artificial Sequence:  Synthetic
  misc_feature (1)..(1): 5'-3 attached terminal deoxyabasic moiety
  misc_feature (1)..(2): 2'-deoxy-2'-fluoro
  misc_feature (4)..(4): 2'-deoxy-2'-fluoro
  misc_feature (7)..(7): 2'-deoxy-2'-fluoro
  misc_feature (9)..(9): 2'-deoxy-2'-fluoro
  misc_feature (12)..(13): 2'-deoxy-2'-fluoro
  misc_feature (15)..(15): 2'-deoxy-2'-fluoro
  misc_feature (19)..(19): 2'-deoxy-2'-fluoro
  misc_feature (1)..(19): ribonucleotide unmodified or modified as described for this sequence
  misc_feature (21)..(21): 3'-3 attached terminal deoxyabasic moiety
cuacaauguggccauggactt

SEQ ID NO: 1810 - DNA, 21 bp, Artificial Sequence
  Description of Artificial Sequence:  Synthetic
  misc_feature (1)..(1): 5'-3 attached terminal deoxyabasic moiety
  misc_feature (2)..(2): 2'-deoxy-2'-fluoro
  misc_feature (4)..(8): 2'-deoxy-2'-fluoro
  misc_feature (11)..(11): 2'-deoxy-2'-fluoro
  misc_feature (13)..(16): 2'-deoxy-2'-fluoro
  misc_feature (18)..(19): 2'-deoxy-2'-fluoro
  misc_feature (1)..(19): ribonucleotide unmodified or modified as described for this sequence
  misc_feature (21)..(21): 3'-3 attached terminal deoxyabasic moiety
guguucccaaugcuuuguctt

SEQ ID NO: 1811 - DNA, 21 bp, Artificial Sequence
  Description of Artificial Sequence:  Synthetic
  misc_feature (1)..(4): 2'-deoxy-2'-fluoro
  misc_feature (7)..(13): 2'-deoxy-2'-fluoro
  misc_feature (15)..(16): 2'-deoxy-2'-fluoro
  misc_feature (19)..(19): 2'-deoxy-2'-fluoro
  misc_feature (20)..(20): Phosphorothioate 3'-Internucleotide Linkage
  misc_feature (1)..(19): ribonucleotide unmodified or modified as described for this sequence
ccucaguuucuucaucagutt

SEQ ID NO: 1812 - DNA, 21 bp, Artificial Sequence
  Description of Artificial Sequence:  Synthetic
  misc_feature (3)..(3): 2'-deoxy-2'-fluoro
  misc_feature (7)..(7): 2'-deoxy-2'-fluoro
  misc_feature (10)..(10): 2'-deoxy-2'-fluoro
  misc_feature (12)..(17): 2'-deoxy-2'-fluoro
  misc_feature (20)..(20): Phosphorothioate 3'-Internucleotide Linkage
  misc_feature (1)..(19): ribonucleotide unmodified or modified as described for this sequence
aaugaaugaugcucccuggtt

SEQ ID NO: 1813 - DNA, 21 bp, Artificial Sequence
  Description of Artificial Sequence:  Synthetic
  misc_feature (1)..(4): 2'-deoxy-2'-fluoro
  misc_feature (6)..(7): 2'-deoxy-2'-fluoro
  misc_feature (9)..(9): 2'-deoxy-2'-fluoro
  misc_feature (13)..(13): 2'-deoxy-2'-fluoro
  misc_feature (15)..(15): 2'-deoxy-2'-fluoro
  misc_feature (18)..(18): 2'-deoxy-2'-fluoro
  misc_feature (20)..(20): Phosphorothioate 3'-Internucleotide Linkage
  misc_feature (1)..(19): ribonucleotide unmodified or modified as described for this sequence
ccccacuacagacauagcgtt

SEQ ID NO: 1814 - DNA, 21 bp, Artificial Sequence
  Description of Artificial Sequence:  Synthetic
  misc_feature (1)..(1): 2'-deoxy-2'-fluoro
  misc_feature (3)..(3): 2'-deoxy-2'-fluoro
  misc_feature (5)..(7): 2'-deoxy-2'-fluoro
  misc_feature (13)..(14): 2'-deoxy-2'-fluoro
  misc_feature (17)..(19): 2'-deoxy-2'-fluoro
  misc_feature (20)..(20): Phosphorothioate 3'-Internucleotide Linkage
  misc_feature (1)..(19): ribonucleotide unmodified or modified as described for this sequence
cguauuugagggucagcuctt

SEQ ID NO: 1815 - DNA, 21 bp, Artificial Sequence
  Description of Artificial Sequence:  Synthetic
  misc_feature (2)..(2): 2'-deoxy-2'-fluoro
  misc_feature (4)..(8): 2'-deoxy-2'-fluoro
  misc_feature (11)..(11): 2'-deoxy-2'-fluoro
  misc_feature (15)..(15): 2'-deoxy-2'-fluoro
  misc_feature (17)..(18): 2'-deoxy-2'-fluoro
  misc_feature (20)..(20): Phosphorothioate 3'-Internucleotide Linkage
  misc_feature (1)..(19): ribonucleotide unmodified or modified as described for this sequence
guguccucagugaaugucgtt

SEQ ID NO: 1816 - DNA, 21 bp, Artificial Sequence
  Description of Artificial Sequence:  Synthetic
  misc_feature (1)..(1): 2'-deoxy-2'-fluoro
  misc_feature (3)..(3): 2'-deoxy-2'-fluoro
  misc_feature (5)..(6): 2'-deoxy-2'-fluoro
  misc_feature (8)..(8): 2'-deoxy-2'-fluoro
  misc_feature (12)..(15): 2'-deoxy-2'-fluoro
  misc_feature (19)..(19): 2'-deoxy-2'-fluoro
  misc_feature (20)..(20): Phosphorothioate 3'-Internucleotide Linkage
  misc_feature (1)..(19): ribonucleotide unmodified or modified as described for this sequence
cacauuguaggucuugagctt

SEQ ID NO: 1817 - DNA, 21 bp, Artificial Sequence
  Description of Artificial Sequence:  Synthetic
  misc_feature (2)..(4): 2'-deoxy-2'-fluoro
  misc_feature (6)..(6): 2'-deoxy-2'-fluoro
  misc_feature (9)..(10): 2'-deoxy-2'-fluoro
  misc_feature (12)..(12): 2'-deoxy-2'-fluoro
  misc_feature (14)..(15): 2'-deoxy-2'-fluoro
  misc_feature (17)..(17): 2'-deoxy-2'-fluoro
  misc_feature (20)..(20): Phosphorothioate 3'-Internucleotide Linkage
  misc_feature (1)..(19): ribonucleotide unmodified or modified as described for this sequence
guccauggccacauuguagtt

SEQ ID NO: 1818 - DNA, 21 bp, Artificial Sequence
  Description of Artificial Sequence:  Synthetic
  misc_feature (3)..(3): 2'-deoxy-2'-fluoro
  misc_feature (8)..(8): 2'-deoxy-2'-fluoro
  misc_feature (10)..(11): 2'-deoxy-2'-fluoro
  misc_feature (17)..(17): 2'-deoxy-2'-fluoro
  misc_feature (19)..(19): 2'-deoxy-2'-fluoro
  misc_feature (20)..(20): Phosphorothioate 3'-Internucleotide Linkage
  misc_feature (1)..(19): ribonucleotide unmodified or modified as described for this sequence
gacaaagcauugggaacactt

SEQ ID NO: 1819 - DNA, 21 bp, Artificial Sequence
  Description of Artificial Sequence:  Synthetic
  misc_feature (1)..(1): 5'-3 attached terminal deoxyabasic moiety
  misc_feature (1)..(1): 2'-deoxy
  misc_feature (2)..(3): 2'-deoxy-2'-fluoro
  misc_feature (4)..(5): 2'-deoxy
  misc_feature (6)..(6): 2'-deoxy-2'-fluoro
  misc_feature (7)..(13): 2'-deoxy
  misc_feature (14)..(15): 2'-deoxy-2'-fluoro
  misc_feature (16)..(19): 2'-deoxy
  misc_feature (1)..(19): ribonucleotide unmodified or modified as described for this sequence
  misc_feature (21)..(21): 3'-3 attached terminal deoxyabasic moiety
acugaugaagaaacugaggtt

SEQ ID NO: 1820 - DNA, 21 bp, Artificial Sequence
  Description of Artificial Sequence:  Synthetic
  misc_feature (1)..(1): 5'-3 attached terminal deoxyabasic moiety
  misc_feature (1)..(2): 2'-deoxy-2'-fluoro
  misc_feature (3)..(8): 2'-deoxy
  misc_feature (9)..(9): 2'-deoxy-2'-fluoro
  misc_feature (10)..(10): 2'-deoxy
  misc_feature (11)..(12): 2'-deoxy-2'-fluoro
  misc_feature (13)..(13): 2'-deoxy
  misc_feature (14)..(16): 2'-deoxy-2'-fluoro
  misc_feature (17)..(17): 2'-deoxy
  misc_feature (18)..(19): 2'-deoxy-2'-fluoro
  misc_feature (1)..(19): ribonucleotide unmodified or modified as described for this sequence
  misc_feature (21)..(21): 3'-3 attached terminal deoxyabasic moiety
ccagggagcaucauucauutt

SEQ ID NO: 1821 - DNA, 21 bp, Artificial Sequence
  Description of Artificial Sequence:  Synthetic
  misc_feature (1)..(1): 5'-3 attached terminal deoxyabasic moiety
  misc_feature (1)..(1): 2'-deoxy-2'-fluoro
  misc_feature (2)..(2): 2'-deoxy
  misc_feature (3)..(4): 2'-deoxy-2'-fluoro
  misc_feature (5)..(5): 2'-deoxy
  misc_feature (6)..(6): 2'-deoxy-2'-fluoro
  misc_feature (7)..(7): 2'-deoxy
  misc_feature (8)..(10): 2'-deoxy-2'-fluoro
  misc_feature (11)..(11): 2'-deoxy
  misc_feature (12)..(12): 2'-deoxy-2'-fluoro
  misc_feature (13)..(14): 2'-deoxy
  misc_feature (15)..(15): 2'-deoxy-2'-fluoro
  misc_feature (16)..(19): 2'-deoxy
  misc_feature (1)..(19): ribonucleotide unmodified or modified as described for this sequence
  misc_feature (21)..(21): 3'-3 attached terminal deoxyabasic moiety
cgcuaugucuguaguggggtt

SEQ ID NO: 1822 - DNA, 21 bp, Artificial Sequence
  Description of Artificial Sequence:  Synthetic
  misc_feature (1)..(1): 5'-3 attached terminal deoxyabasic moiety
  misc_feature (1)..(3): 2'-deoxy
  misc_feature (4)..(5): 2'-deoxy-2'-fluoro
  misc_feature (6)..(7): 2'-deoxy
  misc_feature (8)..(12): 2'-deoxy-2'-fluoro
  misc_feature (13)..(15): 2'-deoxy
  misc_feature (16)..(16): 2'-deoxy-2'-fluoro
  misc_feature (17)..(17): 2'-deoxy
  misc_feature (18)..(18): 2'-deoxy-2'-fluoro
  misc_feature (19)..(19): 2'-deoxy
  misc_feature (1)..(19): ribonucleotide unmodified or modified as described for this sequence
  misc_feature (21)..(21): 3'-3 attached terminal deoxyabasic moiety
gagcugacccucaaauacgtt

SEQ ID NO: 1823 - DNA, 21 bp, Artificial Sequence
  Description of Artificial Sequence:  Synthetic
  misc_feature (1)..(1): 5'-3 attached terminal deoxyabasic moiety
  misc_feature (1)..(1): 2'-deoxy-2'-fluoro
  misc_feature (2)..(3): 2'-deoxy
  misc_feature (4)..(4): 2'-deoxy-2'-fluoro
  misc_feature (5)..(5): 2'-deoxy
  misc_feature (6)..(8): 2'-deoxy-2'-fluoro
  misc_feature (9)..(9): 2'-deoxy
  misc_feature (10)..(11): 2'-deoxy-2'-fluoro
  misc_feature (12)..(16): 2'-deoxy
  misc_feature (17)..(17): 2'-deoxy-2'-fluoro
  misc_feature (18)..(18): 2'-deoxy
  misc_feature (19)..(19): 2'-deoxy-2'-fluoro
  misc_feature (1)..(19): ribonucleotide unmodified or modified as described for this sequence
  misc_feature (21)..(21): 3'-3 attached terminal deoxyabasic moiety
cgacauucacugaggacactt

SEQ ID NO: 1824 - DNA, 21 bp, Artificial Sequence
  Description of Artificial Sequence:  Synthetic
  misc_feature (1)..(1): 5'-3 attached terminal deoxyabasic moiety
  misc_feature (1)..(1): 2'-deoxy
  misc_feature (2)..(4): 2'-deoxy-2'-fluoro
  misc_feature (5)..(8): 2'-deoxy
  misc_feature (9)..(11): 2'-deoxy-2'-fluoro
  misc_feature (12)..(12): 2'-deoxy
  misc_feature (13)..(13): 2'-deoxy-2'-fluoro
  misc_feature (14)..(15): 2'-deoxy
  misc_feature (16)..(16): 2'-deoxy-2'-fluoro
  misc_feature (17)..(17): 2'-deoxy
  misc_feature (18)..(18): 2'-deoxy-2'-fluoro
  misc_feature (19)..(19): 2'-deoxy
  misc_feature (1)..(19): ribonucleotide unmodified or modified as described for this sequence
  misc_feature (21)..(21): 3'-3 attached terminal deoxyabasic moiety
gcucaagaccuacaaugugtt

SEQ ID NO: 1825 - DNA, 21 bp, Artificial Sequence
  Description of Artificial Sequence:  Synthetic
  misc_feature (1)..(1): 5'-3 attached terminal deoxyabasic moiety
  misc_feature (1)..(2): 2'-deoxy-2'-fluoro
  misc_feature (3)..(3): 2'-deoxy
  misc_feature (4)..(4): 2'-deoxy-2'-fluoro
  misc_feature (5)..(6): 2'-deoxy
  misc_feature (7)..(7): 2'-deoxy-2'-fluoro
  misc_feature (8)..(8): 2'-deoxy
  misc_feature (9)..(9): 2'-deoxy-2'-fluoro
  misc_feature (10)..(11): 2'-deoxy
  misc_feature (12)..(13): 2'-deoxy-2'-fluoro
  misc_feature (14)..(14): 2'-deoxy
  misc_feature (15)..(15): 2'-deoxy-2'-fluoro
  misc_feature (16)..(18): 2'-deoxy
  misc_feature (19)..(19): 2'-deoxy-2'-fluoro
  misc_feature (1)..(19): ribonucleotide unmodified or modified as described for this sequence
  misc_feature (21)..(21): 3'-3 attached terminal deoxyabasic moiety
cuacaauguggccauggactt

SEQ ID NO: 1826 - DNA, 21 bp, Artificial Sequence
  Description of Artificial Sequence:  Synthetic
  misc_feature (1)..(1): 5'-3 attached terminal deoxyabasic moiety
  misc_feature (1)..(1): 2'-deoxy
  misc_feature (2)..(2): 2'-deoxy-2'-fluoro
  misc_feature (3)..(3): 2'-deoxy
  misc_feature (4)..(8): 2'-deoxy-2'-fluoro
  misc_feature (9)..(10): 2'-deoxy
  misc_feature (11)..(11): 2'-deoxy-2'-fluoro
  misc_feature (12)..(12): 2'-deoxy
  misc_feature (13)..(16): 2'-deoxy-2'-fluoro
  misc_feature (17)..(17): 2'-deoxy
  misc_feature (18)..(19): 2'-deoxy-2'-fluoro
  misc_feature (1)..(19): ribonucleotide unmodified or modified as described for this sequence
  misc_feature (21)..(21): 3'-3 attached terminal deoxyabasic moiety
guguucccaaugcuuuguctt

SEQ ID NO: 1827 - DNA, 21 bp, Artificial Sequence
  Description of Artificial Sequence:  Synthetic
  misc_feature (1)..(4): 2'-deoxy-2'-fluoro
  misc_feature (5)..(6): 2'-deoxy
  misc_feature (7)..(13): 2'-deoxy-2'-fluoro
  misc_feature (14)..(14): 2'-deoxy
  misc_feature (15)..(16): 2'-deoxy-2'-fluoro
  misc_feature (17)..(18): 2'-deoxy
  misc_feature (19)..(19): 2'-deoxy-2'-fluoro
  misc_feature (20)..(20): Phosphorothioate 3'-Internucleotide Linkage
  misc_feature (1)..(19): ribonucleotide unmodified or modified as described for this sequence
ccucaguuucuucaucagutt

SEQ ID NO: 1828 - DNA, 21 bp, Artificial Sequence
  Description of Artificial Sequence:  Synthetic
  misc_feature (1)..(2): 2'-deoxy
  misc_feature (3)..(3): 2'-deoxy-2'-fluoro
  misc_feature (4)..(6): 2'-deoxy
  misc_feature (7)..(7): 2'-deoxy-2'-fluoro
  misc_feature (8)..(9): 2'-deoxy
  misc_feature (10)..(10): 2'-deoxy-2'-fluoro
  misc_feature (11)..(11): 2'-deoxy
  misc_feature (12)..(17): 2'-deoxy-2'-fluoro
  misc_feature (18)..(19): 2'-deoxy
  misc_feature (20)..(20): Phosphorothioate 3'-Internucleotide Linkage
  misc_feature (1)..(19): ribonucleotide unmodified or modified as described for this sequence
aaugaaugaugcucccuggtt

SEQ ID NO: 1829 - DNA, 21 bp, Artificial Sequence
  Description of Artificial Sequence:  Synthetic
  misc_feature (1)..(4): 2'-deoxy-2'-fluoro
  misc_feature (5)..(5): 2'-deoxy
  misc_feature (6)..(7): 2'-deoxy-2'-fluoro
  misc_feature (8)..(8): 2'-deoxy
  misc_feature (9)..(9): 2'-deoxy-2'-fluoro
  misc_feature (10)..(12): 2'-deoxy
  misc_feature (13)..(13): 2'-deoxy-2'-fluoro
  misc_feature (14)..(14): 2'-deoxy
  misc_feature (15)..(15): 2'-deoxy-2'-fluoro
  misc_feature (16)..(17): 2'-deoxy
  misc_feature (18)..(18): 2'-deoxy-2'-fluoro
  misc_feature (19)..(19): 2'-deoxy
  misc_feature (20)..(20): Phosphorothioate 3'-Internucleotide Linkage
  misc_feature (1)..(19): ribonucleotide unmodified or modified as described for this sequence
ccccacuacagacauagcgtt

SEQ ID NO: 1830 - DNA, 21 bp, Artificial Sequence
  Description of Artificial Sequence:  Synthetic
  misc_feature (1)..(1): 2'-deoxy-2'-fluoro
  misc_feature (2)..(2): 2'-deoxy
  misc_feature (3)..(3): 2'-deoxy-2'-fluoro
  misc_feature (4)..(4): 2'-deoxy
  misc_feature (5)..(7): 2'-deoxy-2'-fluoro
  misc_feature (8)..(12): 2'-deoxy
  misc_feature (13)..(14): 2'-deoxy-2'-fluoro
  misc_feature (15)..(16): 2'-deoxy
  misc_feature (17)..(19): 2'-deoxy-2'-fluoro
  misc_feature (20)..(20): Phosphorothioate 3'-Internucleotide Linkage
  misc_feature (1)..(19): ribonucleotide unmodified or modified as described for this sequence
cguauuugagggucagcuctt

SEQ ID NO: 1831 - DNA, 21 bp, Artificial Sequence
  Description of Artificial Sequence:  Synthetic
  misc_feature (1)..(1): 2'-deoxy
  misc_feature (2)..(2): 2'-deoxy-2'-fluoro
  misc_feature (3)..(3): 2'-deoxy
  misc_feature (4)..(8): 2'-deoxy-2'-fluoro
  misc_feature (9)..(10): 2'-deoxy
  misc_feature (11)..(11): 2'-deoxy-2'-fluoro
  misc_feature (12)..(14): 2'-deoxy
  misc_feature (15)..(15): 2'-deoxy-2'-fluoro
  misc_feature (16)..(16): 2'-deoxy
  misc_feature (17)..(18): 2'-deoxy-2'-fluoro
  misc_feature (19)..(19): 2'-deoxy
  misc_feature (20)..(20): Phosphorothioate 3'-Internucleotide Linkage
  misc_feature (1)..(19): ribonucleotide unmodified or modified as described for this sequence
guguccucagugaaugucgtt

SEQ ID NO: 1832 - DNA, 21 bp, Artificial Sequence
  Description of Artificial Sequence:  Synthetic
  misc_feature (1)..(1): 2'-deoxy-2'-fluoro
  misc_feature (2)..(2): 2'-deoxy
  misc_feature (3)..(3): 2'-deoxy-2'-fluoro
  misc_feature (4)..(4): 2'-deoxy
  misc_feature (5)..(6): 2'-deoxy-2'-fluoro
  misc_feature (7)..(7): 2'-deoxy
  misc_feature (8)..(8): 2'-deoxy-2'-fluoro
  misc_feature (9)..(11): 2'-deoxy
  misc_feature (12)..(15): 2'-deoxy-2'-fluoro
  misc_feature (16)..(18): 2'-deoxy
  misc_feature (19)..(19): 2'-deoxy-2'-fluoro
  misc_feature (20)..(20): Phosphorothioate 3'-Internucleotide Linkage
  misc_feature (1)..(19): ribonucleotide unmodified or modified as described for this sequence
cacauuguaggucuugagctt

SEQ ID NO: 1833 - DNA, 21 bp, Artificial Sequence
  Description of Artificial Sequence:  Synthetic
  misc_feature (1)..(1): 2'-deoxy
  misc_feature (2)..(4): 2'-deoxy-2'-fluoro
  misc_feature (5)..(5): 2'-deoxy
  misc_feature (6)..(6): 2'-deoxy-2'-fluoro
  misc_feature (7)..(8): 2'-deoxy
  misc_feature (9)..(10): 2'-deoxy-2'-fluoro
  misc_feature (11)..(11): 2'-deoxy
  misc_feature (12)..(12): 2'-deoxy-2'-fluoro
  misc_feature (13)..(13): 2'-deoxy
  misc_feature (14)..(15): 2'-deoxy-2'-fluoro
  misc_feature (16)..(16): 2'-deoxy
  misc_feature (17)..(17): 2'-deoxy-2'-fluoro
  misc_feature (18)..(19): 2'-deoxy
  misc_feature (20)..(20): Phosphorothioate 3'-Internucleotide Linkage
  misc_feature (1)..(19): ribonucleotide unmodified or modified as described for this sequence
guccauggccacauuguagtt

SEQ ID NO: 1834 - DNA, 21 bp, Artificial Sequence
  Description of Artificial Sequence:  Synthetic
  misc_feature (1)..(2): 2'-deoxy
  misc_feature (3)..(3): 2'-deoxy-2'-fluoro
  misc_feature (4)..(7): 2'-deoxy
  misc_feature (8)..(8): 2'-deoxy-2'-fluoro
  misc_feature (9)..(9): 2'-deoxy
  misc_feature (10)..(11): 2'-deoxy-2'-fluoro
  misc_feature (12)..(16): 2'-deoxy
  misc_feature (17)..(17): 2'-deoxy-2'-fluoro
  misc_feature (18)..(18): 2'-deoxy
  misc_feature (19)..(19): 2'-deoxy-2'-fluoro
  misc_feature (20)..(20): Phosphorothioate 3'-Internucleotide Linkage
  misc_feature (1)..(19): ribonucleotide unmodified or modified as described for this sequence
gacaaagcauugggaacactt

SEQ ID NO: 1835 - DNA, 21 bp, Artificial Sequence
  Description of Artificial Sequence:  Synthetic
  misc_feature (1)..(1): 5'-3 attached terminal deoxyabasic moiety
  misc_feature (1)..(1): 2'-O-methyl
  misc_feature (2)..(3): 2'-deoxy-2'-fluoro
  misc_feature (4)..(5): 2'-O-methyl
  misc_feature (6)..(6): 2'-deoxy-2'-fluoro
  misc_feature (7)..(13): 2'-O-methyl
  misc_feature (14)..(15): 2'-deoxy-2'-fluoro
  misc_feature (16)..(19): 2'-O-methyl
  misc_feature (1)..(19): ribonucleotide unmodified or modified as described for this sequence
  misc_feature (21)..(21): 3'-3 attached terminal deoxyabasic moiety
acugaugaagaaacugaggtt

SEQ ID NO: 1836 - DNA, 21 bp, Artificial Sequence
  Description of Artificial Sequence:  Synthetic
  misc_feature (1)..(1): 5'-3 attached terminal deoxyabasic moiety
  misc_feature (1)..(2): 2'-deoxy-2'-fluoro
  misc_feature (3)..(8): 2'-O-methyl
  misc_feature (9)..(9): 2'-deoxy-2'-fluoro
  misc_feature (10)..(10): 2'-O-methyl
  misc_feature (11)..(12): 2'-deoxy-2'-fluoro
  misc_feature (13)..(13): 2'-O-methyl
  misc_feature (14)..(16): 2'-deoxy-2'-fluoro
  misc_feature (17)..(17): 2'-O-methyl
  misc_feature (18)..(19): 2'-deoxy-2'-fluoro
  misc_feature (1)..(19): ribonucleotide unmodified or modified as described for this sequence
  misc_feature (21)..(21): 3'-3 attached terminal deoxyabasic moiety
ccagggagcaucauucauutt

SEQ ID NO: 1837 - DNA, 21 bp, Artificial Sequence
  Description of Artificial Sequence:  Synthetic
  misc_feature (1)..(1): 5'-3 attached terminal deoxyabasic moiety
  misc_feature (1)..(1): 2'-deoxy-2'-fluoro
  misc_feature (2)..(2): 2'-O-methyl
  misc_feature (3)..(4): 2'-deoxy-2'-fluoro
  misc_feature (5)..(5): 2'-O-methyl
  misc_feature (6)..(6): 2'-deoxy-2'-fluoro
  misc_feature (7)..(7): 2'-O-methyl
  misc_feature (8)..(10): 2'-deoxy-2'-fluoro
  misc_feature (11)..(11): 2'-O-methyl
  misc_feature (12)..(12): 2'-deoxy-2'-fluoro
  misc_feature (13)..(14): 2'-O-methyl
  misc_feature (15)..(15): 2'-deoxy-2'-fluoro
  misc_feature (16)..(19): 2'-O-methyl
  misc_feature (1)..(19): ribonucleotide unmodified or modified as described for this sequence
  misc_feature (21)..(21): 3'-3 attached terminal deoxyabasic moiety
cgcuaugucuguaguggggtt

SEQ ID NO: 1838 - DNA, 21 bp, Artificial Sequence
  Description of Artificial Sequence:  Synthetic
  misc_feature (1)..(1): 5'-3 attached terminal deoxyabasic moiety
  misc_feature (1)..(3): 2'-O-methyl
  misc_feature (4)..(5): 2'-deoxy-2'-fluoro
  misc_feature (6)..(7): 2'-O-methyl
  misc_feature (8)..(12): 2'-deoxy-2'-fluoro
  misc_feature (13)..(15): 2'-O-methyl
  misc_feature (16)..(16): 2'-deoxy-2'-fluoro
  misc_feature (17)..(17): 2'-O-methyl
  misc_feature (18)..(18): 2'-deoxy-2'-fluoro
  misc_feature (19)..(19): 2'-O-methyl
  misc_feature (1)..(19): ribonucleotide unmodified or modified as described for this sequence
  misc_feature (21)..(21): 3'-3 attached terminal deoxyabasic moiety
gagcugacccucaaauacgtt

SEQ ID NO: 1839 - DNA, 21 bp, Artificial Sequence
  Description of Artificial Sequence:  Synthetic
  misc_feature (1)..(1): 5'-3 attached terminal deoxyabasic moiety
  misc_feature (1)..(1): 2'-deoxy-2'-fluoro
  misc_feature (2)..(3): 2'-O-methyl
  misc_feature (4)..(4): 2'-deoxy-2'-fluoro
  misc_feature (5)..(5): 2'-O-methyl
  misc_feature (6)..(8): 2'-deoxy-2'-fluoro
  misc_feature (9)..(9): 2'-O-methyl
  misc_feature (10)..(11): 2'-deoxy-2'-fluoro
  misc_feature (12)..(16): 2'-O-methyl
  misc_feature (17)..(17): 2'-deoxy-2'-fluoro
  misc_feature (18)..(18): 2'-O-methyl
  misc_feature (19)..(19): 2'-deoxy-2'-fluoro
  misc_feature (1)..(19): ribonucleotide unmodified or modified as described for this sequence
  misc_feature (21)..(21): 3'-3 attached terminal deoxyabasic moiety
cgacauucacugaggacactt

SEQ ID NO: 1840 - DNA, 21 bp, Artificial Sequence
  Description of Artificial Sequence:  Synthetic
  misc_feature (1)..(1): 5'-3 attached terminal deoxyabasic moiety
  misc_feature (1)..(1): 2'-O-methyl
  misc_feature (2)..(4): 2'-deoxy-2'-fluoro
  misc_feature (5)..(8): 2'-O-methyl
  misc_feature (9)..(11): 2'-deoxy-2'-fluoro
  misc_feature (12)..(12): 2'-O-methyl
  misc_feature (13)..(13): 2'-deoxy-2'-fluoro
  misc_feature (14)..(15): 2'-O-methyl
  misc_feature (16)..(16): 2'-deoxy-2'-fluoro
  misc_feature (17)..(17): 2'-O-methyl
  misc_feature (18)..(18): 2'-deoxy-2'-fluoro
  misc_feature (19)..(19): 2'-O-methyl
  misc_feature (1)..(19): ribonucleotide unmodified or modified as described for this sequence
  misc_feature (21)..(21): 3'-3 attached terminal deoxyabasic moiety
gcucaagaccuacaaugugtt

SEQ ID NO: 1841 - DNA, 21 bp, Artificial Sequence
  Description of Artificial Sequence:  Synthetic
  misc_feature (1)..(1): 5'-3 attached terminal deoxyabasic moiety
  misc_feature (1)..(2): 2'-deoxy-2'-fluoro
  misc_feature (3)..(3): 2'-O-methyl
  misc_feature (4)..(4): 2'-deoxy-2'-fluoro
  misc_feature (5)..(6): 2'-O-methyl
  misc_feature (7)..(7): 2'-deoxy-2'-fluoro
  misc_feature (8)..(8): 2'-O-methyl
  misc_feature (9)..(9): 2'-deoxy-2'-fluoro
  misc_feature (10)..(11): 2'-O-methyl
  misc_feature (12)..(13): 2'-deoxy-2'-fluoro
  misc_feature (14)..(14): 2'-O-methyl
  misc_feature (15)..(15): 2'-deoxy-2'-fluoro
  misc_feature (16)..(18): 2'-O-methyl
  misc_feature (19)..(19): 2'-deoxy-2'-fluoro
  misc_feature (1)..(19): ribonucleotide unmodified or modified as described for this sequence
  misc_feature (21)..(21): 3'-3 attached terminal deoxyabasic moiety
cuacaauguggccauggactt

SEQ ID NO: 1842 - DNA, 21 bp, Artificial Sequence
  Description of Artificial Sequence:  Synthetic
  misc_feature (1)..(1): 5'-3 attached terminal deoxyabasic moiety
  misc_feature (1)..(1): 2'-O-methyl
  misc_feature (2)..(2): 2'-deoxy-2'-fluoro
  misc_feature (3)..(3): 2'-O-methyl
  misc_feature (4)..(8): 2'-deoxy-2'-fluoro
  misc_feature (9)..(10): 2'-O-methyl
  misc_feature (11)..(11): 2'-deoxy-2'-fluoro
  misc_feature (12)..(12): 2'-O-methyl
  misc_feature (13)..(16): 2'-deoxy-2'-fluoro
  misc_feature (17)..(17): 2'-O-methyl
  misc_feature (18)..(19): 2'-deoxy-2'-fluoro
  misc_feature (1)..(19): ribonucleotide unmodified or modified as described for this sequence
  misc_feature (21)..(21): 3'-3 attached terminal deoxyabasic moiety
guguucccaaugcuuuguctt

SEQ ID NO: 1843 - DNA, 21 bp, Artificial Sequence
  Description of Artificial Sequence:  Synthetic
  misc_feature (1)..(4): 2'-deoxy-2'-fluoro
  misc_feature (5)..(6): 2'-O-methyl
  misc_feature (7)..(13): 2'-deoxy-2'-fluoro
  misc_feature (14)..(14): 2'-O-methyl
  misc_feature (15)..(16): 2'-deoxy-2'-fluoro
  misc_feature (17)..(18): 2'-O-methyl
  misc_feature (19)..(19): 2'-deoxy-2'-fluoro
  misc_feature (20)..(20): Phosphorothioate 3'-Internucleotide Linkage
  misc_feature (1)..(19): ribonucleotide unmodified or modified as described for this sequence
ccucaguuucuucaucagutt

SEQ ID NO: 1844 - DNA, 21 bp, Artificial Sequence
  Description of Artificial Sequence:  Synthetic
  misc_feature (1)..(2): 2'-O-methyl
  misc_feature (3)..(3): 2'-deoxy-2'-fluoro
  misc_feature (4)..(6): 2'-O-methyl
  misc_feature (7)..(7): 2'-deoxy-2'-fluoro
  misc_feature (8)..(9): 2'-O-methyl
  misc_feature (10)..(10): 2'-deoxy-2'-fluoro
  misc_feature (11)..(11): 2'-O-methyl
  misc_feature (12)..(17): 2'-deoxy-2'-fluoro
  misc_feature (18)..(19): 2'-O-methyl
  misc_feature (20)..(20): Phosphorothioate 3'-Internucleotide Linkage
  misc_feature (1)..(19): ribonucleotide unmodified or modified as described for this sequence
aaugaaugaugcucccuggtt

SEQ ID NO: 1845 - DNA, 21 bp, Artificial Sequence
  Description of Artificial Sequence:  Synthetic
  misc_feature (1)..(4): 2'-deoxy-2'-fluoro
  misc_feature (5)..(5): 2'-O-methyl
  misc_feature (6)..(7): 2'-deoxy-2'-fluoro
  misc_feature (8)..(8): 2'-O-methyl
  misc_feature (9)..(9): 2'-deoxy-2'-fluoro
  misc_feature (10)..(12): 2'-O-methyl
  misc_feature (13)..(13): 2'-deoxy-2'-fluoro
  misc_feature (14)..(14): 2'-O-methyl
  misc_feature (15)..(15): 2'-deoxy-2'-fluoro
  misc_feature (16)..(17): 2'-O-methyl
  misc_feature (18)..(18): 2'-deoxy-2'-fluoro
  misc_feature (19)..(19): 2'-O-methyl
  misc_feature (20)..(20): Phosphorothioate 3'-Internucleotide Linkage
  misc_feature (1)..(19): ribonucleotide unmodified or modified as described for this sequence
ccccacuacagacauagcgtt

SEQ ID NO: 1846 - DNA, 21 bp, Artificial Sequence
  Description of Artificial Sequence:  Synthetic
  misc_feature (1)..(1): 2'-deoxy-2'-fluoro
  misc_feature (2)..(2): 2'-O-methyl
  misc_feature (3)..(3): 2'-deoxy-2'-fluoro
  misc_feature (4)..(4): 2'-O-methyl
  misc_feature (5)..(7): 2'-deoxy-2'-fluoro
  misc_feature (8)..(12): 2'-O-methyl
  misc_feature (13)..(14): 2'-deoxy-2'-fluoro
  misc_feature (15)..(16): 2'-O-methyl
  misc_feature (17)..(19): 2'-deoxy-2'-fluoro
  misc_feature (20)..(20): Phosphorothioate 3'-Internucleotide Linkage
  misc_feature (1)..(19): ribonucleotide unmodified or modified as described for this sequence
cguauuugagggucagcuctt

SEQ ID NO: 1847 - DNA, 21 bp, Artificial Sequence
  Description of Artificial Sequence:  Synthetic
  misc_feature (1)..(1): 2'-O-methyl
  misc_feature (2)..(2): 2'-deoxy-2'-fluoro
  misc_feature (3)..(3): 2'-O-methyl
  misc_feature (4)..(8): 2'-deoxy-2'-fluoro
  misc_feature (9)..(10): 2'-O-methyl
  misc_feature (11)..(11): 2'-deoxy-2'-fluoro
  misc_feature (12)..(14): 2'-O-methyl
  misc_feature (15)..(15): 2'-deoxy-2'-fluoro
  misc_feature (16)..(16): 2'-O-methyl
  misc_feature (17)..(18): 2'-deoxy-2'-fluoro
  misc_feature (19)..(19): 2'-O-methyl
  misc_feature (20)..(20): Phosphorothioate 3'-Internucleotide Linkage
  misc_feature (1)..(19): ribonucleotide unmodified or modified as described for this sequence
guguccucagugaaugucgtt

SEQ ID NO: 1848 - DNA, 21 bp, Artificial Sequence
  Description of Artificial Sequence:  Synthetic
  misc_feature (1)..(1): 2'-deoxy-2'-fluoro
  misc_feature (2)..(2): 2'-O-methyl
  misc_feature (3)..(3): 2'-deoxy-2'-fluoro
  misc_feature (4)..(4): 2'-O-methyl
  misc_feature (5)..(6): 2'-deoxy-2'-fluoro
  misc_feature (7)..(7): 2'-O-methyl
  misc_feature (8)..(8): 2'-deoxy-2'-fluoro
  misc_feature (9)..(11): 2'-O-methyl
  misc_feature (12)..(15): 2'-deoxy-2'-fluoro
  misc_feature (16)..(18): 2'-O-methyl
  misc_feature (19)..(19): 2'-deoxy-2'-fluoro
  misc_feature (20)..(20): Phosphorothioate 3'-Internucleotide Linkage
  misc_feature (1)..(19): ribonucleotide unmodified or modified as described for this sequence
cacauuguaggucuugagctt

SEQ ID NO: 1849 - DNA, 21 bp, Artificial Sequence
  Description of Artificial Sequence:  Synthetic
  misc_feature (1)..(1): 2'-O-methyl
  misc_feature (2)..(4): 2'-deoxy-2'-fluoro
  misc_feature (5)..(5): 2'-O-methyl
  misc_feature (6)..(6): 2'-deoxy-2'-fluoro
  misc_feature (7)..(8): 2'-O-methyl
  misc_feature (9)..(10): 2'-deoxy-2'-fluoro
  misc_feature (11)..(11): 2'-O-methyl
  misc_feature (12)..(12): 2'-deoxy-2'-fluoro
  misc_feature (13)..(13): 2'-O-methyl
  misc_feature (14)..(15): 2'-deoxy-2'-fluoro
  misc_feature (16)..(16): 2'-O-methyl
  misc_feature (17)..(17): 2'-deoxy-2'-fluoro
  misc_feature (18)..(19): 2'-O-methyl
  misc_feature (20)..(20): Phosphorothioate 3'-Internucleotide Linkage
  misc_feature (1)..(19): ribonucleotide unmodified or modified as described for this sequence
guccauggccacauuguagtt

SEQ ID NO: 1850 - DNA, 21 bp, Artificial Sequence
  Description of Artificial Sequence:  Synthetic
  misc_feature (1)..(2): 2'-O-methyl
  misc_feature (3)..(3): 2'-deoxy-2'-fluoro
  misc_feature (4)..(7): 2'-O-methyl
  misc_feature (8)..(8): 2'-deoxy-2'-fluoro
  misc_feature (9)..(9): 2'-O-methyl
  misc_feature (10)..(11): 2'-deoxy-2'-fluoro
  misc_feature (12)..(16): 2'-O-methyl
  misc_feature (17)..(17): 2'-deoxy-2'-fluoro
  misc_feature (18)..(18): 2'-O-methyl
  misc_feature (19)..(19): 2'-deoxy-2'-fluoro
  misc_feature (20)..(20): Phosphorothioate 3'-Internucleotide Linkage
  misc_feature (1)..(19): ribonucleotide unmodified or modified as described for this sequence
gacaaagcauugggaacactt

SEQ ID NO: 1851 - DNA, 21 bp, Artificial Sequence
  Description of Artificial Sequence:  Synthetic
  misc_feature (1)..(1): 5'-3 attached terminal deoxyabasic moiety
  misc_feature (1)..(19): ribonucleotide unmodified or modified as described for this sequence
  misc_feature (21)..(21): 3'-3 attached terminal deoxyabasic moiety
acugaugaagaaacugaggtt

SEQ ID NO: 1852 - DNA, 21 bp, Artificial Sequence
  Description of Artificial Sequence:  Synthetic
  misc_feature (1)..(1): 5'-3 attached terminal deoxyabasic moiety
  misc_feature (1)..(19): ribonucleotide unmodified or modified as described for this sequence
  misc_feature (21)..(21): 3'-3 attached terminal deoxyabasic moiety
ccagggagcaucauucauutt

SEQ ID NO: 1853 - DNA, 21 bp, Artificial Sequence
  Description of Artificial Sequence:  Synthetic
  misc_feature (1)..(1): 5'-3 attached terminal deoxyabasic moiety
  misc_feature (1)..(19): ribonucleotide unmodified or modified as described for this sequence
  misc_feature (21)..(21): 3'-3 attached terminal deoxyabasic moiety
cgcuaugucuguaguggggtt

SEQ ID NO: 1854 - DNA, 21 bp, Artificial Sequence
  Description of Artificial Sequence:  Synthetic
  misc_feature (1)..(1): 5'-3 attached terminal deoxyabasic moiety
  misc_feature (1)..(19): ribonucleotide unmodified or modified as described for this sequence
  misc_feature (21)..(21): 3'-3 attached terminal deoxyabasic moiety
gagcugacccucaaauacgtt

SEQ ID NO: 1855 - DNA, 21 bp, Artificial Sequence
  Description of Artificial Sequence:  Synthetic
  misc_feature (1)..(1): 5'-3 attached terminal deoxyabasic moiety
  misc_feature (1)..(19): ribonucleotide unmodified or modified as described for this sequence
  misc_feature (21)..(21): 3'-3 attached terminal deoxyabasic moiety
cgacauucacugaggacactt

SEQ ID NO: 1856 - DNA, 21 bp, Artificial Sequence
  Description of Artificial Sequence:  Synthetic
  misc_feature (1)..(1): 5'-3 attached terminal deoxyabasic moiety
  misc_feature (1)..(19): ribonucleotide unmodified or modified as described for this sequence
  misc_feature (21)..(21): 3'-3 attached terminal deoxyabasic moiety
gcucaagaccuacaaugugtt

SEQ ID NO: 1857 - DNA, 21 bp, Artificial Sequence
  Description of Artificial Sequence:  Synthetic
  misc_feature (1)..(1): 5'-3 attached terminal deoxyabasic moiety
  misc_feature (1)..(19): ribonucleotide unmodified or modified as described for this sequence
  misc_feature (21)..(21): 3'-3 attached terminal deoxyabasic moiety
cuacaauguggccauggactt

SEQ ID NO: 1858 - DNA, 21 bp, Artificial Sequence
  Description of Artificial Sequence:  Synthetic
  misc_feature (1)..(1): 5'-3 attached terminal deoxyabasic moiety
  misc_feature (1)..(19): ribonucleotide unmodified or modified as described for this sequence
  misc_feature (21)..(21): 3'-3 attached terminal deoxyabasic moiety
guguucccaaugcuuuguctt

SEQ ID NO: 1859 - DNA, 21 bp, Artificial Sequence
  Description of Artificial Sequence:  Synthetic
  misc_feature (20)..(20): Phosphorothioate 3'-Internucleotide Linkage
  misc_feature (1)..(19): ribonucleotide unmodified or modified as described for this sequence
ccucaguuucuucaucagutt

SEQ ID NO: 1860 - DNA, 21 bp, Artificial Sequence
  Description of Artificial Sequence:  Synthetic
  misc_feature (20)..(20): Phosphorothioate 3'-Internucleotide Linkage
  misc_feature (1)..(19): ribonucleotide unmodified or modified as described for this sequence
aaugaaugaugcucccuggtt

SEQ ID NO: 1861 - DNA, 21 bp, Artificial Sequence
  Description of Artificial Sequence:  Synthetic
  misc_feature (20)..(20): Phosphorothioate 3'-Internucleotide Linkage
  misc_feature (1)..(19): ribonucleotide unmodified or modified as described for this sequence
ccccacuacagacauagcgtt

SEQ ID NO: 1862 - DNA, 21 bp, Artificial Sequence
  Description of Artificial Sequence:  Synthetic
  misc_feature (20)..(20): Phosphorothioate 3'-Internucleotide Linkage
  misc_feature (1)..(19): ribonucleotide unmodified or modified as described for this sequence
cguauuugagggucagcuctt

SEQ ID NO: 1863 - DNA, 21 bp, Artificial Sequence
  Description of Artificial Sequence:  Synthetic
  misc_feature (20)..(20): Phosphorothioate 3'-Internucleotide Linkage
  misc_feature (1)..(19): ribonucleotide unmodified or modified as described for this sequence
guguccucagugaaugucgtt

SEQ ID NO: 1864 - DNA, 21 bp, Artificial Sequence
  Description of Artificial Sequence:  Synthetic
  misc_feature (20)..(20): Phosphorothioate 3'-Internucleotide Linkage
  misc_feature (1)..(19): ribonucleotide unmodified or modified as described for this sequence
cacauuguaggucuugagctt

SEQ ID NO: 1865 - DNA, 21 bp, Artificial Sequence
  Description of Artificial Sequence:  Synthetic
  misc_feature (20)..(20): Phosphorothioate 3'-Internucleotide Linkage
  misc_feature (1)..(19): ribonucleotide unmodified or modified as described for this sequence
guccauggccacauuguagtt

SEQ ID NO: 1866 - DNA, 21 bp, Artificial Sequence
  Description of Artificial Sequence:  Synthetic
  misc_feature (20)..(20): Phosphorothioate 3'-Internucleotide Linkage
  misc_feature (1)..(19): ribonucleotide unmodified or modified as described for this sequence
gacaaagcauugggaacactt

SEQ ID NO: 1867 - DNA, 21 bp, Artificial Sequence
  Description of Artificial Sequence:  Synthetic
  misc_feature (1)..(4): 2'-deoxy-2'-fluoro
  misc_feature (5)..(6): 2'-O-methyl
  misc_feature (7)..(13): 2'-deoxy-2'-fluoro
  misc_feature (14)..(14): 2'-O-methyl
  misc_feature (15)..(16): 2'-deoxy-2'-fluoro
  misc_feature (17)..(18): 2'-O-methyl
  misc_feature (19)..(19): 2'-deoxy-2'-fluoro
  misc_feature (1)..(19): ribonucleotide unmodified or modified as described for this sequence
  misc_feature (21)..(21): 3'-3 attached terminal deoxyabasic moiety
ccucaguuucuucaucagutt

SEQ ID NO: 1868 - DNA, 21 bp, Artificial Sequence
  Description of Artificial Sequence:  Synthetic
  misc_feature (1)..(2): 2'-O-methyl
  misc_feature (3)..(3): 2'-deoxy-2'-fluoro
  misc_feature (4)..(6): 2'-O-methyl
  misc_feature (7)..(7): 2'-deoxy-2'-fluoro
  misc_feature (8)..(9): 2'-O-methyl
  misc_feature (10)..(10): 2'-deoxy-2'-fluoro
  misc_feature (11)..(11): 2'-O-methyl
  misc_feature (12)..(17): 2'-deoxy-2'-fluoro
  misc_feature (18)..(19): 2'-O-methyl
  misc_feature (1)..(19): ribonucleotide unmodified or modified as described for this sequence
  misc_feature (21)..(21): 3'-3 attached terminal deoxyabasic moiety
aaugaaugaugcucccuggtt

SEQ ID NO: 1869 - DNA, 21 bp, Artificial Sequence
  Description of Artificial Sequence:  Synthetic
  misc_feature (1)..(4): 2'-deoxy-2'-fluoro
  misc_feature (5)..(5): 2'-O-methyl
  misc_feature (6)..(7): 2'-deoxy-2'-fluoro
  misc_feature (8)..(8): 2'-O-methyl
  misc_feature (9)..(9): 2'-deoxy-2'-fluoro
  misc_feature (10)..(12): 2'-O-methyl
  misc_feature (13)..(13): 2'-deoxy-2'-fluoro
  misc_feature (14)..(14): 2'-O-methyl
  misc_feature (15)..(15): 2'-deoxy-2'-fluoro
  misc_feature (16)..(17): 2'-O-methyl
  misc_feature (18)..(18): 2'-deoxy-2'-fluoro
  misc_feature (19)..(19): 2'-O-methyl
  misc_feature (1)..(19): ribonucleotide unmodified or modified as described for this sequence
  misc_feature (21)..(21): 3'-3 attached terminal deoxyabasic moiety
ccccacuacagacauagcgtt

SEQ ID NO: 1870 - DNA, 21 bp, Artificial Sequence
  Description of Artificial Sequence:  Synthetic
  misc_feature (1)..(1): 2'-deoxy-2'-fluoro
  misc_feature (2)..(2): 2'-O-methyl
  misc_feature (3)..(3): 2'-deoxy-2'-fluoro
  misc_feature (4)..(4): 2'-O-methyl
  misc_feature (5)..(7): 2'-deoxy-2'-fluoro
  misc_feature (8)..(12): 2'-O-methyl
  misc_feature (13)..(14): 2'-deoxy-2'-fluoro
  misc_feature (15)..(16): 2'-O-methyl
  misc_feature (17)..(19): 2'-deoxy-2'-fluoro
  misc_feature (1)..(19): ribonucleotide unmodified or modified as described for this sequence
  misc_feature (21)..(21): 3'-3 attached terminal deoxyabasic moiety
cguauuugagggucagcuctt

SEQ ID NO: 1871 - DNA, 21 bp, Artificial Sequence
  Description of Artificial Sequence:  Synthetic
  misc_feature (1)..(1): 2'-O-methyl
  misc_feature (2)..(2): 2'-deoxy-2'-fluoro
  misc_feature (3)..(3): 2'-O-methyl
  misc_feature (4)..(8): 2'-deoxy-2'-fluoro
  misc_feature (9)..(10): 2'-O-methyl
  misc_feature (11)..(11): 2'-deoxy-2'-fluoro
  misc_feature (12)..(14): 2'-O-methyl
  misc_feature (15)..(15): 2'-deoxy-2'-fluoro
  misc_feature (16)..(16): 2'-O-methyl
  misc_feature (17)..(18): 2'-deoxy-2'-fluoro
  misc_feature (19)..(19): 2'-O-methyl
  misc_feature (1)..(19): ribonucleotide unmodified or modified as described for this sequence
  misc_feature (21)..(21): 3'-3 attached terminal deoxyabasic moiety
guguccucagugaaugucgtt

SEQ ID NO: 1872 - DNA, 21 bp, Artificial Sequence
  Description of Artificial Sequence:  Synthetic
  misc_feature (1)..(1): 2'-deoxy-2'-fluoro
  misc_feature (2)..(2): 2'-O-methyl
  misc_feature (3)..(3): 2'-deoxy-2'-fluoro
  misc_feature (4)..(4): 2'-O-methyl
  misc_feature (5)..(6): 2'-deoxy-2'-fluoro
  misc_feature (7)..(7): 2'-O-methyl
  misc_feature (8)..(8): 2'-deoxy-2'-fluoro
  misc_feature (9)..(11): 2'-O-methyl
  misc_feature (12)..(15): 2'-deoxy-2'-fluoro
  misc_feature (16)..(18): 2'-O-methyl
  misc_feature (19)..(19): 2'-deoxy-2'-fluoro
  misc_feature (1)..(19): ribonucleotide unmodified or modified as described for this sequence
  misc_feature (21)..(21): 3'-3 attached terminal deoxyabasic moiety
cacauuguaggucuugagctt

SEQ ID NO: 1873 - DNA, 21 bp, Artificial Sequence
  Description of Artificial Sequence:  Synthetic
  misc_feature (1)..(1): 2'-O-methyl
  misc_feature (2)..(4): 2'-deoxy-2'-fluoro
  misc_feature (5)..(5): 2'-O-methyl
  misc_feature (6)..(6): 2'-deoxy-2'-fluoro
  misc_feature (7)..(8): 2'-O-methyl
  misc_feature (9)..(10): 2'-deoxy-2'-fluoro
  misc_feature (11)..(11): 2'-O-methyl
  misc_feature (12)..(12): 2'-deoxy-2'-fluoro
  misc_feature (13)..(13): 2'-O-methyl
  misc_feature (14)..(15): 2'-deoxy-2'-fluoro
  misc_feature (16)..(16): 2'-O-methyl
  misc_feature (17)..(17): 2'-deoxy-2'-fluoro
  misc_feature (18)..(19): 2'-O-methyl
  misc_feature (1)..(19): ribonucleotide unmodified or modified as described for this sequence
  misc_feature (21)..(21): 3'-3 attached terminal deoxyabasic moiety
guccauggccacauuguagtt

SEQ ID NO: 1874 - DNA, 21 bp, Artificial Sequence
  Description of Artificial Sequence:  Synthetic
  misc_feature (1)..(2): 2'-O-methyl
  misc_feature (3)..(3): 2'-deoxy-2'-fluoro
  misc_feature (4)..(7): 2'-O-methyl
  misc_feature (8)..(8): 2'-deoxy-2'-fluoro
  misc_feature (9)..(9): 2'-O-methyl
  misc_feature (10)..(11): 2'-deoxy-2'-fluoro
  misc_feature (12)..(16): 2'-O-methyl
  misc_feature (17)..(17): 2'-deoxy-2'-fluoro
  misc_feature (18)..(18): 2'-O-methyl
  misc_feature (19)..(19): 2'-deoxy-2'-fluoro
  misc_feature (1)..(19): ribonucleotide unmodified or modified as described for this sequence
  misc_feature (21)..(21): 3'-3 attached terminal deoxyabasic moiety
gacaaagcauugggaacactt

SEQ ID NO: 1875 - DNA, 21 bp, Artificial Sequence
  Description of Artificial Sequence:  Synthetic
  misc_feature (1)..(19): ribonucleotide unmodified or modified as described for this sequence
  misc_feature (21)..(21): 3'-3 attached terminal deoxyabasic moiety
ccucaguuucuucaucagutt

SEQ ID NO: 1876 - DNA, 21 bp, Artificial Sequence
  Description of Artificial Sequence:  Synthetic
  misc_feature (1)..(19): ribonucleotide unmodified or modified as described for this sequence
  misc_feature (21)..(21): 3'-3 attached terminal deoxyabasic moiety
aaugaaugaugcucccuggtt

SEQ ID NO: 1877 - DNA, 21 bp, Artificial Sequence
  Description of Artificial Sequence:  Synthetic
  misc_feature (1)..(19): ribonucleotide unmodified or modified as described for this sequence
  misc_feature (21)..(21): 3'-3 attached terminal deoxyabasic moiety
ccccacuacagacauagcgtt

SEQ ID NO: 1878 - DNA, 21 bp, Artificial Sequence
  Description of Artificial Sequence:  Synthetic
  misc_feature (1)..(19): ribonucleotide unmodified or modified as described for this sequence
  misc_feature (21)..(21): 3'-3 attached terminal deoxyabasic moiety
cguauuugagggucagcuctt

SEQ ID NO: 1879 - DNA, 21 bp, Artificial Sequence
  Description of Artificial Sequence:  Synthetic
  misc_feature (1)..(19): ribonucleotide unmodified or modified as described for this sequence
  misc_feature (21)..(21): 3'-3 attached terminal deoxyabasic moiety
guguccucagugaaugucgtt

SEQ ID NO: 1880 - DNA, 21 bp, Artificial Sequence
  Description of Artificial Sequence:  Synthetic
  misc_feature (1)..(19): ribonucleotide unmodified or modified as described for this sequence
  misc_feature (21)..(21): 3'-3 attached terminal deoxyabasic moiety
cacauuguaggucuugagctt

SEQ ID NO: 1881 - DNA, 21 bp, Artificial Sequence
  Description of Artificial Sequence:  Synthetic
  misc_feature (1)..(19): ribonucleotide unmodified or modified as described for this sequence
  misc_feature (21)..(21): 3'-3 attached terminal deoxyabasic moiety
guccauggccacauuguagtt

SEQ ID NO: 1882 - DNA, 21 bp, Artificial Sequence
  Description of Artificial Sequence:  Synthetic
  misc_feature (1)..(19): ribonucleotide unmodified or modified as described for this sequence
  misc_feature (21)..(21): 3'-3 attached terminal deoxyabasic moiety
gacaaagcauugggaacactt

SEQ ID NO: 1883 - DNA, 21 bp, Artificial Sequence
  Description of Artificial Sequence:  Synthetic
  misc_feature (1)..(1): 5'-3 attached terminal deoxyabasic moiety
  misc_feature (21)..(21): 3'-3 attached terminal deoxyabasic moiety
  misc_feature (1)..(19): any ribonucleotide unmodified or modified as described for this sequence
  misc_feature (20)..(21): n stands for any nucleotide
nnnnnnnnnnnnnnnnnnnnn

SEQ ID NO: 1884 - DNA, 21 bp, Artificial Sequence
  Description of Artificial Sequence:  Synthetic
  misc_feature (20)..(20): Phosphorothioate 3'-Internucleotide Linkage
  misc_feature (1)..(19): any ribonucleotide unmodified or modified as described for this sequence
  misc_feature (20)..(21): n stands for any nucleotide
  misc_feature (21)..(21): 3'-3 attached terminal glyceryl moiety
nnnnnnnnnnnnnnnnnnnnn

SEQ ID NO: 1885 - DNA, 21 bp, Artificial Sequence
  Description of Artificial Sequence:  Synthetic
  misc_feature (1)..(19): n is any ribonucleotide wherein any pyrimidine is 2'-Fluoro and all purine nucleotides are 2'-o-methyl
  misc_feature (20)..(20): Phosphorothioate 3'-Internucleotide Linkage
  misc_feature (20)..(21): n stands for any nucleotide
nnnnnnnnnnnnnnnnnnnnn

SEQ ID NO: 1886 - DNA, 21 bp, Artificial Sequence
  Description of Artificial Sequence:  Synthetic
  misc_feature (1)..(19): n is any ribonucleotide wherein any pyrimidine is 2'-Fluoro and all purine nucleotides are 2'-o-methyl
  misc_feature (20)..(20): Phosphorothioate 3'-Internucleotide Linkage
  misc_feature (20)..(21): n stands for any nucleotide
  misc_feature (21)..(21): 3'-3 attached terminal glyceryl moiety
nnnnnnnnnnnnnnnnnnnnn

SEQ ID NO: 1887 - DNA, 21 bp, Artificial Sequence
  Description of Artificial Sequence:  Synthetic
  misc_feature (1)..(19): n is any ribonucleotide wherein any pyrimidine is 2'-O-methyl or 2'-Fluoro
  misc_feature (20)..(21): n stands for any nucleotide
  misc_feature (1)..(1): 5'-3 attached terminal deoxyabasic moiety
  misc_feature (21)..(21): 3'-3 attached terminal deoxyabasic moiety
nnnnnnnnnnnnnnnnnnnnn

SEQ ID NO: 1888 - DNA, 21 bp, Artificial Sequence
  Description of Artificial Sequence:  Synthetic
  misc_feature (1)..(19): n is any ribonucleotide wherein any pyrimidine is 2'-Fluoro
  misc_feature (20)..(20): Phosphorothioate 3'-Internucleotide Linkage
  misc_feature (20)..(21): n stands for any nucleotide
  misc_feature (21)..(21): 3'-3 attached terminal glyceryl moiety
nnnnnnnnnnnnnnnnnnnnn

SEQ ID NO: 1889 - DNA, 21 bp, Artificial Sequence
  Description of Artificial Sequence:  Synthetic
  misc_feature (1)..(19): n is any ribonucleotide wherein any pyrimidine is 2'-Fluoro and any purine is 2'-Deoxy
  misc_feature (20)..(21): n stands for any nucleotide
  misc_feature (1)..(1): 5'-3 attached terminal deoxyabasic moiety
  misc_feature (21)..(21): 3'-3 attached terminal deoxyabasic moiety
nnnnnnnnnnnnnnnnnnnnn

SEQ ID NO: 1890 - DNA, 21 bp, Artificial Sequence
  Description of Artificial Sequence:  Synthetic
  misc_feature (1)..(19): n is any ribonucleotide wherein any pyrimidine is 2'-Fluoro
  misc_feature (20)..(21): n stands for any nucleotide
  misc_feature (1)..(1): 5'-3 attached terminal deoxyabasic moiety
  misc_feature (21)..(21): 3'-3 attached terminal deoxyabasic moiety
nnnnnnnnnnnnnnnnnnnnn

SEQ ID NO: 1891 - DNA, 21 bp, Artificial Sequence
  Description of Artificial Sequence:  Synthetic
  misc_feature (1)..(19): n is any ribonucleotide wherein any pyrimidine is 2'-Fluoro and any purine is 2'-deoxy
  misc_feature (20)..(21): n stands for any nucleotide
  misc_feature (20)..(20): Phosphorothioate or Phosphorodithioate 3'-Internucleotide Linkage
  misc_feature (21)..(21): 3'-3 attached terminal glyceryl moiety
nnnnnnnnnnnnnnnnnnnnn

SEQ ID NO: 1892 - DNA, 21 bp, Artificial Sequence
  Description of Artificial Sequence:  Synthetic
  misc_feature (1)..(1): 5'-3 attached terminal deoxyabasic moiety
  misc_feature (21)..(21): 3'-3 attached terminal deoxyabasic moiety
  misc_feature (1)..(19): ribonucleotide unmodified or modified as described for this sequence
cauggcugccaucugcgcctt

SEQ ID NO: 1893 - DNA, 21 bp, Artificial Sequence
  Description of Artificial Sequence:  Synthetic
  misc_feature (20)..(20): Phosphorothioate or Phosphorodithioate 3'-Internucleotide Linkage
  misc_feature (1)..(19): ribonucleotide unmodified or modified as described for this sequence
  misc_feature (21)..(21): 3'-3 attached terminal glyceryl moiety
ggcgcagauggcagccaugtt

SEQ ID NO: 1894 - DNA, 21 bp, Artificial Sequence
  Description of Artificial Sequence:  Synthetic
  misc_feature (2)..(2): 2'-O-Methyl
  misc_feature (4)..(5): 2'-O-Methyl
  misc_feature (8)..(8): 2'-O-Methyl
  misc_feature (11)..(11): 2'-O-Methyl
  misc_feature (15)..(15): 2'-O-Methyl
  misc_feature (17)..(17): 2'-O-Methyl
  misc_feature (1)..(1): 2'-deoxy-2'-Fluoro
  misc_feature (3)..(3): 2'-deoxy-2'-Fluoro
  misc_feature (6)..(7): 2'-deoxy-2'-Fluoro
  misc_feature (9)..(10): 2'-deoxy-2'-Fluoro
  misc_feature (12)..(14): 2'-deoxy-2'-Fluoro
  misc_feature (16)..(16): 2'-deoxy-2'-Fluoro
  misc_feature (18)..(19): 2'-deoxy-2'-Fluoro
  misc_feature (20)..(20): Phosphorothioate or Phosphorodithioate 3'-Internucleotide Linkage
  misc_feature (1)..(19): ribonucleotide unmodified or modified as described for this sequence
cauggcugccaucugcgcctt

SEQ ID NO: 1895 - DNA, 21 bp, Artificial Sequence
  Description of Artificial Sequence:  Synthetic
  misc_feature (1)..(2): 2'-O-Methyl
  misc_feature (4)..(4): 2'-O-Methyl
  misc_feature (6)..(8): 2'-O-Methyl
  misc_feature (10)..(11): 2'-O-Methyl
  misc_feature (13)..(14): 2'-O-Methyl
  misc_feature (17)..(17): 2'-O-Methyl
  misc_feature (19)..(19): 2'-O-Methyl
  misc_feature (3)..(3): 2'-deoxy-2'-Fluoro
  misc_feature (5)..(5): 2'-deoxy-2'-Fluoro
  misc_feature (9)..(9): 2'-deoxy-2'-Fluoro
  misc_feature (12)..(12): 2'-deoxy-2'-Fluoro
  misc_feature (15)..(16): 2'-deoxy-2'-Fluoro
  misc_feature (18)..(18): 2'-deoxy-2'-Fluoro
  misc_feature (1)..(19): ribonucleotide unmodified or modified as described for this sequence
  misc_feature (20)..(20): Phosphorothioate or Phosphorodithioate 3'-Internucleotide Linkage
  misc_feature (21)..(21): 3'-3 attached terminal glyceryl moiety
ggcgcagauggcagccaugtt

SEQ ID NO: 1896 - DNA, 21 bp, Artificial Sequence
  Description of Artificial Sequence:  Synthetic
  misc_feature (1)..(1): 2'-deoxy-2'-Fluoro
  misc_feature (3)..(3): 2'-deoxy-2'-Fluoro
  misc_feature (6)..(7): 2'-deoxy-2'-Fluoro
  misc_feature (9)..(10): 2'-deoxy-2'-Fluoro
  misc_feature (12)..(14): 2'-deoxy-2'-Fluoro
  misc_feature (16)..(16): 2'-deoxy-2'-Fluoro
  misc_feature (18)..(19): 2'-deoxy-2'-Fluoro
  misc_feature (1)..(1): 5'-3 attached terminal deoxyabasic moiety
  misc_feature (21)..(21): 3'-3 attached terminal deoxyabasic moiety
  misc_feature (1)..(19): ribonucleotide unmodified or modified as described for this sequence
cauggcugccaucugcgcctt

SEQ ID NO: 1897 - DNA, 21 bp, Artificial Sequence
  Description of Artificial Sequence:  Synthetic
  misc_feature (3)..(3): 2'-deoxy-2'-Fluoro
  misc_feature (5)..(5): 2'-deoxy-2'-Fluoro
  misc_feature (9)..(9): 2'-deoxy-2'-Fluoro
  misc_feature (12)..(12): 2'-deoxy-2'-Fluoro
  misc_feature (15)..(16): 2'-deoxy-2'-Fluoro
  misc_feature (18)..(18): 2'-deoxy-2'-Fluoro
  misc_feature (1)..(19): ribonucleotide unmodified or modified as described for this sequence
  misc_feature (20)..(20): Phosphorothioate or Phosphorodithioate 3'-Internucleotide Linkage
  misc_feature (21)..(21): 3'-3 attached terminal glyceryl moiety
ggcgcagauggcagccaugtt

SEQ ID NO: 1898 - DNA, 21 bp, Artificial Sequence
  Description of Artificial Sequence:  Synthetic
  misc_feature (2)..(2): 2'-deoxy
  misc_feature (4)..(5): 2'-deoxy
  misc_feature (8)..(8): 2'-deoxy
  misc_feature (11)..(11): 2'-deoxy
  misc_feature (15)..(15): 2'-deoxy
  misc_feature (17)..(17): 2'-deoxy
  misc_feature (1)..(1): 2'-deoxy-2'-Fluoro
  misc_feature (3)..(3): 2'-deoxy-2'-Fluoro
  misc_feature (6)..(7): 2'-deoxy-2'-Fluoro
  misc_feature (9)..(10): 2'-deoxy-2'-Fluoro
  misc_feature (12)..(14): 2'-deoxy-2'-Fluoro
  misc_feature (16)..(16): 2'-deoxy-2'-Fluoro
  misc_feature (18)..(19): 2'-deoxy-2'-Fluoro
  misc_feature (1)..(1): 5'-3 attached terminal deoxyabasic moiety
  misc_feature (21)..(21): 3'-3 attached terminal deoxyabasic moiety
  misc_feature (1)..(19): ribonucleotide unmodified or modified as described for this sequence
cauggcugccaucugcgcctt

SEQ ID NO: 1899 - DNA, 21 bp, Artificial Sequence
  Description of Artificial Sequence:  Synthetic
  misc_feature (1)..(1): 2'-deoxy-2'-Fluoro
  misc_feature (3)..(3): 2'-deoxy-2'-Fluoro
  misc_feature (6)..(7): 2'-deoxy-2'-Fluoro
  misc_feature (9)..(10): 2'-deoxy-2'-Fluoro
  misc_feature (12)..(14): 2'-deoxy-2'-Fluoro
  misc_feature (16)..(16): 2'-deoxy-2'-Fluoro
  misc_feature (18)..(19): 2'-deoxy-2'-Fluoro
  misc_feature (1)..(1): 5'-3 attached terminal deoxyabasic moiety
  misc_feature (21)..(21): 3'-3 attached terminal deoxyabasic moiety
  misc_feature (1)..(19): ribonucleotide unmodified or modified as described for this sequence
cauggcugccaucugcgcctt

SEQ ID NO: 1900 - DNA, 21 bp, Artificial Sequence
  Description of Artificial Sequence:  Synthetic
  misc_feature (1)..(2): 2'-deoxy
  misc_feature (4)..(4): 2'-deoxy
  misc_feature (6)..(8): 2'-deoxy
  misc_feature (10)..(11): 2'-deoxy
  misc_feature (13)..(14): 2'-deoxy
  misc_feature (17)..(17): 2'-deoxy
  misc_feature (19)..(19): 2'-deoxy
  misc_feature (3)..(3): 2'-deoxy-2'-Fluoro
  misc_feature (5)..(5): 2'-deoxy-2'-Fluoro
  misc_feature (9)..(9): 2'-deoxy-2'-Fluoro
  misc_feature (12)..(12): 2'-deoxy-2'-Fluoro
  misc_feature (15)..(16): 2'-deoxy-2'-Fluoro
  misc_feature (18)..(18): 2'-deoxy-2'-Fluoro
  misc_feature (1)..(19): ribonucleotide unmodified or modified as described for this sequence
  misc_feature (20)..(20): Phosphorothioate or Phosphorodithioate 3'-Internucleotide Linkage
  misc_feature (21)..(21): 3'-3 attached terminal glyceryl moiety
ggcgcagauggcagccaugtt

SEQ ID NO: 1901 - RNA, 14 nt, Artificial Sequence
  Description of Artificial Sequence:  Synthetic
auauaucuauuucg

SEQ ID NO: 1902 - RNA, 14 nt, Artificial Sequence
  Description of Artificial Sequence:  Synthetic
cgaaauaguauaua

SEQ ID NO: 1903 - RNA, 22 nt, Artificial Sequence
  Description of Artificial Sequence:  Synthetic
cgaaauaguauauacuauuucg

SEQ ID NO: 1904 - DNA, 24 bp, Artificial Sequence
  Description of Artificial Sequence:  Synthetic
  misc_feature (1)..(22): ribonucleotide
cgaaauaguauauacuauuucgtt

SEQ ID NO: 1905 - RNA, 3579 nt, Homo sapiens
aguuuccucggcagcgguaggcgagagcacgcggaggagcgugcgcgggggccccgggagacggcggcgguggcggcgcgggcagagcaaggacgcggcggaucccacucgcacagcagcgcacucggugccccgcgcagggucgcgaugcugcccgguuuggcacugcuccugcuggccgccuggacggcucgggcgcuggagguacccacugaugguaaugcuggccugcuggcugaaccccagauugccauguucuguggcagacugaacaugcacaugaauguccagaaugggaagugggauucagauccaucagggaccaaaaccugcauugauaccaaggaaggcauccugcaguauugccaagaagucuacccugaacugcagaucaccaaugugguagaagccaaccaaccagugaccauccagaacuggugcaagcggggccgcaagcagugcaagacccauccccacuuugugauucccuaccgcugcuuaguuggugaguuuguaagugaugcccuucucguuccugacaagugcaaauucuuacaccaggagaggauggauguuugcgaaacucaucuucacuggcacaccgucgccaaagagacaugcagugagaagaguaccaacuugcaugacuacggcauguugcugcccugcggaauugacaaguuccgagggguagaguuuguguguugcccacuggcugaagaaagugacaauguggauucugcugaugcggaggaggaugacucggaugucugguggggcggagcagacacagacuaugcagaugggagugaagacaaaguaguagaaguagcagaggaggaagaaguggcugagguggaagaagaagaagccgaugaugacgaggacgaugaggauggugaugagguagaggaagaggcugaggaacccuacgaagaagccacagagagaaccaccagcauugccaccaccaccaccaccaccacagagucuguggaagaggugguucgagaggugugcucugaacaagccgagacggggccgugccgagcaaugaucucccgcugguacuuugaugugacugaagggaagugugccccauucuuuuacggcggauguggcggcaaccggaacaacuuugacacagaagaguacugcauggccguguguggcagcgccaugucccaaaguuuacucaagacuacccaggaaccucuugcccgagauccuguuaaacuuccuacaacagcagccaguaccccugaugccguugacaaguaucucgagacaccuggggaugagaaugaacaugcccauuuccagaaagccaaagagaggcuugaggccaagcaccgagagagaaugucccaggucaugagagaaugggaagaggcagaacgucaagcaaagaacuugccuaaagcugauaagaaggcaguuauccagcauuuccaggagaaaguggaaucuuuggaacaggaagcagccaacgagagacagcagcugguggagacacacauggccagaguggaagccaugcucaaugaccgccgccgccuggcccuggagaacuacaucaccgcucugcaggcuguuccuccucggccucgucacguguucaauaugcuaaagaaguauguccgcgcagaacagaaggacagacagcacacccuaaagcauuucgagcaugugcgcaugguggaucccaagaaagccgcucagauccggucccagguuaugacacaccuccgugugauuuaugagcgcaugaaucagucucucucccugcucuacaacgugccugcaguggccgaggagauucaggaugaaguugaugagcugcuucagaaagagcaaaacuauucagaugacgucuuggccaacaugauuagugaaccaaggaucaguuacggaaacgaugcucucaugccaucuuugaccgaaacgaaaaccaccguggagcuccuucccgugaauggagaguucagccuggacgaucuccagccguggcauucuuuuggggcugacucugugccagccaacacagaaaacgaaguugagccuguugaugcccgcccugcugccgaccgaggacugaccacucgaccagguucuggguugacaaauaucaagacggaggagaucucugaagugaagauggaugcagaauuccgacaugacucaggauaugaaguucaucaucaaaaauugguguucuuugcagaagauguggguucaaacaaaggugcaaucauuggacucauggugggcgguguugucauagcgacagugaucgucaucaccuuggugaugcugaagaagaaacaguacacauccauucaucauggugugguggagguugacgccgcugucaccccagaggagcgccaccuguccaagaugcagcagaacggcuacgaaaauccaaccuacaaguucuuugagcagaugcagaacuagacccccgccacagcagccucugaaguuggacagcaaaaccauugcuucacuacccaucgguguccauuuauagaauaaugugggaagaaacaaacccguuuuaugauuuacucauuaucgccuuuugacagcugugcuguaacacaaguagaugccugaacuugaauuaauccacacaucaguaauguauucuaucucucuuuacauuuuggucucuauacuacauuauuaauggguuuuguguacuguaaagaauuuagcuguaucaaacuagugcaugaauagauucucuccugauuauuuaucacauagccccuuagccaguuguauauuauucuugugguuugugacccaauuaaguccuacuuuacauaugcuuuaagaaucgaugggggaugcuucaugugaacgugggaguucagcugcuucucuugccuaaguauuccuuuccugaucacuaugcauuuuaaaguuaaacauuuuuaaguauuucagaugcuuuagagagauuuuuuuuccaugacugcauuuuacuguacagauugcugcuucugcuauauuugugauauaggaauuaagaggauacacacguuuguuucuucgugccuguuuuaugugcacacauuaggcauugagacuucaagcuuuucuuuuuuuguccacguaucuuugggucuuugauaaagaaaagaaucccuguucauuguaagcacuuuuacggggcggguggggaggggugcucugcuggucuucaauuaccaagaauucuccaaaacaauuuucugcaggaugauuguacagaaucauugcuuaugacaugaucgcuuucuacacuguauuacauaaauaaauuaaauaaaauaaccccgggcaagacuuuucuuugaaggaugacuacagacauuaaauaaucgaaguaauuuuggguggggagaagaggcagauucaauuuucuuuaaccagucugaaguuucauuuaugauacaaaagaagaugaaaauggaaguggcaauauaaggggaugaggaaggcaugccuggacaaacccuucuuuuaagaugugucuucaauuuguauaaaaugguguuuucauguaaauaaauacauucuuggaggagc

What we claim is:

1. A chemically modified double stranded short interfering ribonucleic acid (siRNA) molecule comprising a separate sense strand and antisense strand, each strand having one or more pyrimidine nucleotides and one or more purine nucleotides, wherein:
a) each strand of the siRNA molecule is about 18 to about 27 nucleotides in length;
b) the antisense strand of the siRNA molecule comprises about 18 to about 27 nucleotides that are complementary to human amyloid precursor protein (APP) RNA comprising SEQ ID NO: 1905 and the sense strand is complementary to the antisense strand;
c) the sense strand of the siRNA molecule comprises a portion of the APP RNA nucleotide sequence of about 18 to about 27 nucleotides;
d) about 50 to 100 percent of the nucleotide positions in each of the sense and antisense strands of the siRNA molecule are chemically modified; and
e) about 50 to 100 percent of the purine nucleotides in one or both strands of the siRNA molecule are 2′-O-methyl purine nucleotides and about 50 to 100 percent of the pyrimidine nucleotides in one or both strands of the siRNA molecule are 2′-deoxy-2′-fluoro pyrimidine nucleotides.

2. The siRNA molecule of claim 1, wherein said siRNA molecule comprises one or more ribonucleotides.

3. The siRNA molecule of claim 1, wherein one or more pyrimidine nucleotides present in the sense strand are 2′-O-methyl pyrimidine nucleotides.

4. The siRNA molecule of claim 1, wherein one or more purine nucleotides present in the sense strand are 2′-deoxy purine nucleotides.

5. The siRNA molecule of claim 1, wherein about 50 to 100 percent of the pyrimidine nucleotides present in the sense strand are 2′-deoxy-2′-fluoro pyrimidine nucleotides.

6. The siRNA molecule of claim 1, wherein the sense strand includes a terminal cap moiety at the 5′-end, the 3′-end, or both of the 5′ and 3′ ends of the sense strand.

7. The siRNA molecule of claim 6, wherein said terminal cap moiety is an inverted deoxy abasic moiety.

8. The siRNA molecule of claim 1, wherein about 50 to 100 percent of the pyrimidine nucleotides present in the antisense strand are 2′-deoxy-2′-fluoro pyrimidine nucleotides.

9. The siRNA molecule of claim 1, wherein about 50 to 100 percent of the purine nucleotides present in the antisense strand are 2′-O-methyl purine nucleotides.

10. The siRNA molecule of claim 1, wherein one or more purine nucleotides present in the antisense strand comprise 2′-deoxy-purine nucleotides.

11. The siRNA molecule of claim 1, wherein said antisense strand comprises a terminal phosphorothioate internucleotide linkage at the 3′ end of said antisense strand.

12. The siRNA molecule of claim 1, wherein said antisense strand includes a terminal phosphate group.

13. A composition comprising the siRNA molecule of claim 1 in a pharmaceutically acceptable carrier or diluent.
